United States Patent Application Publication US 2006/0194265 A1 - sequence listing, part 5

SEQ ID NO: 712 - DNA, 174518 bp, Mus musculus
  misc_feature (1)...(174518): n = A,T,C or G
cacagctcatctttccttctctaacggggactttctgcttttattgctttctctggttgatccctcccacccgtgaatcttgtcagtttcaggaacttcctgaagatcatttattgacttgtttaccttcctgcttgagattccctgcaggatgggtgtttcaatcttagaggaaacaagaacaataatcttgttgtgataaatctccaacccaaataagctctggcaatgaaatcatgactcaattaataggaatacatgctgtgcacctagattgggcagatctaccaataccatcttccacatctatgagacccatccaggccatgtgcttctgctctgcttttcttcttcctccttttctgtgccctctccctctcccattttctcctccttctctcttcccaccttcctctccaccttcccttttatctgcccaatcatcagttctcctttattttacaaattgaggtgggaagcaggtttacaggaaatcacctgagtgctgactcattccttgttcacaaccactcacaagagaattgaccttaaatataattagccccagggctatccacaacaatggggtgtttcaatcttagaggaaacaagaacaataatccccccaaaagagaactaatcccgcatgaaggtacagagaaggtaagcgtagaaagacttcgatgcctgcaaagaaaccagtcctgcttacagcctaagagttaggaagatattggttgtttataccagccaatctgtgggactccgctatggaaatcataggaaactaacacagtgacctaacatagaattgggggggggggtctcagcatcaaatagcagtaatagtaacagtgtcactatttactaagcagatcctgtgagccagggtttgggttacacacatcctcccccacccaagtattatctcatttagtattcatgtaacctccgtgagtcataacctttccccttcccccaatcttctaagacgatgctgaggctcccagagcccaaggctacctaattacaaaactactaactggaggcataggatctagaattgaggtctgactagggccattatatcctggtacaaagaaaatggcttctcgtcttttgggcacagaaagcccctgtgtcagagggcaggggctagcgagcagagggctggttggctttcagtcctccttgcctctttgggcaaacctccactttacaatgacctgctctgtagcacaggtgctcagttgttatattggaccagctgggggttgaggtggctgtggtagcatcaggaggtacacaggggtcatgagtattggggtgcagttgagaaagaggccccgggggctccttgtgacctttaggaaggcattagacctcccttcagccctgttctgctcactggccttagcacacccccaatccctccggtctctcagtcagcaagaaatctagtttgcaggatcacgtgctaggatgacctattgacctttttaccaccatcctcgccgtccctactattaccaccaaaccaaaaagcccaagaaatgcctctctggctgttttatttgactccgactttcagcgtctatgcctttcctcacaattaaagctccatttcgctctaaagtttgcagctttcatgaagagggaaaagggacctttgacaccgtaaatatttaatcaccattgagatgtccaaaagatgagggaatggacggtgcagatggctggctctgagaagcaacaaaagaagccatagtggtggggcagggggtgggacagggggtggggcagggggtgggcaggggtggagcaggggtgggcagggagtggggaacggggtggggcaggggtggagcaggggtcggaggtcggggtaacctaaaacatgccatctttagagcttaaagtggctcacattcctattcactaagtgtgcctgagctatgaaggaagctagatttattaatttatttatctctttaaatattgggcggggtgaactaagatgagatctggaggtgaagaagtctgacgctctcctcctacttctgttttggtaaccatgaagagacacgaaatttctagactatatcgaggtgactgctggagttcagacgtgggggagaaaatgtctaaagaaggaaaaaaaagagctgtctgttcggttttgtgtcttgtttgaaaatacacttcaaacattcgacagtatttcggagatcataactgcctatgcccccaccacctcctgagcccttggcccccgggagtccagattcacttttaagtactttttagctttatgttttaactggaaaaaaaaataatcttgcccagtagggcttccatttgtttctatcaatgggctgaatttagtttaggaaaggctgtggagaaagaatgaaatgtgccttttccccttgccagatctggacgcaccaaccgtttggaaataaagggcatgcaatttgccaagtgttcctgctgaagggccatcccgcatctcttctggatctttctttgaggtaggttgagttgatggttatattcttgcaggaagcaagtgataggaacggaagcattaaaggggtggggtggtggctgaggtatgggcatggtaagggggcaagccaaagctggcatcagtaggaggcgctgcgtgctacaggtacagggtgaggggtgaggggtgctgagtgaaccagggcactgagagaggacaccccgtggagccaatggccttttagaagacctggtcacagctagtatactgattatcaggtagggatctgggggggctaagcaccccaacttcaccttagctctccactccggggtctcccacagggcctcccattggctgaatccaaccagaagccaaactgtccttagatgcagactttcggtatagaacgagactgggaaggcaggagatgataggaagaactgaaggcgacgcagccaggatggataagaagacatacgcagaaaggattgaggaaggaggggtaggttaagttctgcgggtatcctgacctaagaactcatggtgctgtatataggaaatgggcaccacatcccccgccccccgccccccgccccccgcccccgcctctcctctctttcgttttatgtcacatcttagtaaaagatttttgaaaagacaaaatgaagccaggcatggttgcatgtgcccgcaatgctaacactagagaggttaaagcagaagagtttctactttgaggccagcctgggctatacggcaagaggctatcttaaaacgcagggagcagggggattgaaaagatgactgctcttgcagaagaccaaggtttggttcccaaggcctacacagtggctcacaaatgtctgttactccagagccaagggatccagtgccctcttctggcttctggagacactaggcacacacacagtatgtggtatatacacaagcaaatacttataaacgtgaaatgcaatgattttttttccccaaaggactgggagacgtctcaatcaggaaaagtgcttgctatacaagcttggggggtctgactttggatccccatgtaaatactgggcgtgatggtgtatgtcagtaacccctaggccagtgggatggaaaacatgaatccctcgggctcactgatcaattagcctgtccagccaaatcagtgggcttcagattctgtagacgccagtgctgacctctgaccttcatttgcacgcgcacacacgcgcacatccaaccccttgcctgccccctccccccccacacattaaaaaagaggggaaagccaaaagcagcagaaggccaagaaaagtattcagctcttacatttgagatttggtgcgcgagacgcttagcatcagcaatccaatggaaccatcacgccctcaatacttcccaagcatggatgaggacaagaaacgcttccccagtcttccccaggaccacgtgcccagccaccagccagccactgcccatactcagaactcattccaggctacatggcgatatttcgtagggagggcaaggactgtggaataagccgcgtgtgctccgcagagagcgccagattgctcgcccagaagtccagccacttcatcgtcagctgagagaatctccccaccagaatctcgaggaagcggaagcacaagcgactgtggagctatctgcctgttaatcttatcttctgctattcattttaagagtttgagttattattaatatgaaggtctgctttatggcagctcttcttgttgaatgagtttgtgccaagctgcctgccagttatcaagggactcaggggcccagggttacactaacagcgagtccctgagatgtgatgacagagacatgaaaagattttttttttttttgtcctaagagggatcagtattttatgtttaccctcaataaccttttggcgcttcatttcaaaggaacattaagaaaaaaatacaagcaaggatagccacacatttcaaaaataaatctttatttataaaaaaaaatttaattttaatttaaaattaatttaaattaatttaatcaattaatttagttaacttaaaaattaaataactttaattttaattttaagagaccacccaggttgcagaagtgtcctaaagctgaagatgtaattagccgatgagtttgcctacttcctgcagatctagaaaactcgatggtcgctgatgacttaacggtattttgctgtcaatcaagggcggcctcagatccttcaccacaggcagagcaagtgtcggaagaaacttcaccttcctgagtcagggccgtagtctgttttctattgctgtgagaaacaccatgacaaaaagcaagctgagggggaaagggttaatttcatcctgcagcctacagcccatcctgaggagaagagaggtcaggacctgaaacagaggccatagaggaacactgcttactgaactgctctctgcccttgctgatccaactcaggaccctttgcccaagggtggcagcacctgcagtgggctggtccttcccacatcaattaataataataatgataataataataagaataagaataataatggcctgcagatgtgctacagaccagtctgatggcggcaaattctccactgaaattccatcttcccagatgatacttgtctgtgtcaaggtgacaaaaacttaaccagcccagcctgccgcttctgtaacacagcaccgagtgccagggtagtttatgtcctggactctgcagcctctgagaaaaattggcatttaccaccctttccaaaggcccttataatattgaaggctcttacaggccgtaaagaaaggcagcgttgggactttacgcaaagaacagtggttttgaatgtccacctctgttcttttgtctgtaagtgttactcttctgggaagcaatatgtaatccaactctgctgagtcatgacagagaaagctgacaactgaaatgttggaggtgagcccatcacacaatccagccttcttacaggaactaacactgggtactgtcaccaagcatagaaggttactctccatccatccatccatccatccatccatccatccatccaaggccatgttgactgacagcaggacctgatcttacactccctcagctcttgcgcgcgccagactcgaccagcaaggacgctgcaacaggatccttctgcacacgtttattgggagagcttgattgtagaggcgaagagaccccgagcccagaactggtgctgcttttataggcctaggagaggcgtgtcttacaccaggattggttatgcactacgcctcatttgcatgttcctcatctgattggctactctctctctctctgtacctcacagagcctcattatcatacctcatttgcatgtctcacatctgattagttatactctcaaagcctcattaccatgcccgggccaggcactgtctttgcaaaaaactttactgcatatgtacacattggttgtttgtccaaacttatacgtggtggccagcagtagtcagtgccactctgcaacggcacatgtggcttcccacactcagccacaccttgaaaacttgtttaaagtgtggatattcttgaccaatggtccttgtctgtggatggagaaacactgagagggagagagacaagaatgctgggggaggaagggcaggcccacctggccagccagcttagtcagctcaactgcgatcaatgaggtgacggacgtcacagccagatccctcagtcatatctcatgactgcgctgaattcaactgacttctattggctgaactgtgttcaactcatctcttagcatccactcaaactataaaacgatacttcctctagtgtactttcaactatctgttaatctgaagaccaggaaggaagctggctcaattcattttcctgtcagtcaccaaaagggaccagaaactttgataaggttttcagcccgaagaccacatagatatgagcagagttgtggagaggcaaggtggcctgtctgaaattccaggaggccaaaacagatgtgatctctgtggaattgggcaaggtgtcatcgtagctacaaagaaagggtgtgtaaaggatctcttgaccactagaactaacattcttagttgcttctggctcccatcaacccaatcagccctttaaagtatggtcagttaaaaaaaaaaaaaaaaagcaaaacagaagagtgaaatgtgaatgataaccatcttgtgactgtgaccaattgcctactgaacagccgttcttaacgtcccaagtcccagcaggaaaccacagaatctataaagccctgtccagcagaaatgagtctgattgtagatggcttggttaacccagattgcctccagtgcctgagggagtggatattttctcattatggagacttttccagctagcaaaggctgtgcgtacaactgctcagaacccatctgaacggcccgtttccgtggtagcaggtctgtctggaggacagatctgtatcaccttcttttgtttggttttcagccatttgtgttacaagaagttctgaaatgtgtcataagggacacccaacaagatggatgggttcagtcaattggtgagggatgagtgagctatggaccctccgccagatgggtgtgtctaagagaaggcctttaaagaaatacagaccctatgcctaaatatttatatagagttgttcatatttcccacacttttcaaatgtgaatgtgcgtcctgaaggtggagctttagtacaggagaaaattgggaaggggcaaagacgtttgctcaaaatggggcaggaccagtgaagaacctgtttccaggtttcttaatcgcctacatttttcatgcccaaaagttagcatggattcgggtttcttccactatgggagtctgcacgcaattaaacaggaggagagagagaaagcctgcttgccggaatagggcttatggtctcagcaaactaaggagatgcagggaccatcagaaccctttccacaccttgctggtaatttttgtaggatgttgtttcttctttttcaaaatgcagcagcaaagaattgagcagtgagcaacgtgccacaccatggagtatgtttaatccaaatagcttccaagatgctctgtgactgactgtagcaactctgtggggtttagggaaatggcttgcttaccagcgaagtaaggctatctccaaaatggaattgaatgctgcttcttggcccataacactgccacagcccatctgtgagtcagccacagtgactataggagactgatgcatgtatgccctatgttggagaggaattattttgctatttatttatttatttatttatttatttatttatttatttattcggatttgagtgatgcaaaaaaaattcttaaaatattccaagtggtggagaatgagttgaggggggtattttttttaagcaagtaagccacttgatttgcttcacttaagaggtccatattaacatcaacctagacctacattccctgcttcttttttctctcctctactttctgacactacagaagaggtgacctccagctaacatctgagagcatcggcactgcccatcagcagagagaaacaaggatagccagtccccaaagaggaggttgcacatggaaagatggccacggaccatcttttaaaagccactgctgaaggaatagtgtgtgtgtgtgtgtgtgtgtgtgtgtgtgtgtgtgtgtgtgtacagcagagagaatggaagtcaaggcctggctgagctacacccaccccctaatactgtactgtacatctagattagactttcaagcttcttgcccagttccttctcctcccttctgcctttcgaagctcccatctcagcagcgggaggaacagatctaagcagttctgtggaagtgtaaaacctgcagcaggtgacctgtgaggaagctcattcagagcccccttaaaaaacaatacagattcctatccagagcttggctgacttggagctaagaagagaagatcacacagcaaccagttgcagtcctaggaagatctaggaagaatgcagatcatttcttaaggacccatacgggtctttagctccctctccattcaccacagagttgaaggcaccaaggcttgcctctgggaagcccacttctgagaaaacatgagcttgcctgctccccagagcacagtgatctttctgttccagaaattctcggtggcttgcgaggtgggggaaggggggagcaccccagctgacagttgctacctggatgaagtggtggagggagcccctctagaaacataagagagctccggactcttgagatgcgagccctggctgctgagcccaatgtacctttgcctttattctctggggagtgtagtttagtggccacaggtggcactggactagcaagaaacctgtaagaggctccggtgtgaggtgtggattcgaatctctgctgtgctatttgctaacagctgtacccgggcaggttccatagcttctccaagacctttctcaaaagccgagtagggttgatacaagtcactaattaatactgtttgtcccaagcatcaagtgaatcaaaatctacatggtgcatttagaactatgcccagaacggagcaagttctcaataaatgttagcttttgtcactagggttagatagtgagcagaactttctaagtgctatatctgagagcctgggactccgttgccaagggagaccagggagccttttcaaatatgagagctctggcccgagggattgtccacaacgagagtgtggcgcctttctcctacctcactctgaccgagggaaacccacccccggtcacaggggcgtcttggtccccctcagccgcctcccgcttggccccagccccctggcgcatctctcaggcccccctcccgccgctccacacctgtcagccgccctggcagcctcccaggggctcaagccctgggcctccgccgcaacccgttcgaccctgggtcctggctccgcgagcctcgcgtttgcccggggctgctctcgtaaacaaaacccgggcgttggagcagccccgcgggctggggagcgcgggagccagctcggtgcgcggttccggcgccgggggaacccggggcgagcaaggggcgatggtggcagccgcggcggccgcggcaggcggctcagctttgttatgaatagatgaaagaggccacctacacagtaacccaaattacgagacctccctcctcccgatctcaccgaatcaagaagggaggggagatgggcgtggagggagggcgggcgagaggcggagggcggaggaggaagaggatgaggaaggggccagttgcatcccactttcacaatgggaaagtgaaacgcacaagcgcacccaacctctccagccctccccgcccgcctcgctcccctccgcccgtcccctcccttcccctccgcgcctccccgcgagcgcccgcgccgcacagaggaactctccggcgaaggcggacgaggaggaagcgtctccggagcgcgcagggcttgccgccgcggcacaggctgccggagcgagcccgccgcgcgccgtcctccctgcactccttcccggccgagccgcggggatggggcggccgcgggagcccgagcgcgcgcaggagccgccgccgccgccaccgccgcccgcgtctccgtcgccgcgcgcctgagctgcccgagctgccgcgcgccctgcccgggggcggcccccctagccccatggaggtctcccggaggaagacgccgccgcgccccccgtaccccgccgcaccgttgcccctgatcgcctatctgctggcgctggcagcgcccgcccggggcgcggacgagccggtgtggcgatctgagcaagccatcggagccatcgcggcgagccgggcggacggcgtgttcgtggcgagcggcagctgcctggaccagctggactacagcctgaagaacaggctctctcgcctataccgggaccaagcgggcaactgcacggagcccgtctcgttggcgccccccgcgcggccccggcccgggagcagcttcagcaagctactgctgccctaccgcgagggggcgaccggcctcgaggggctgctgctcaccggctggaccttcgaccggggcgcctgcgaggtgcggcccctgggcaacctgaaccgcagctccctgcgcaacggcaccgaggtggtgtcatgtcacccgcagggttcgacggctggtgtggtgtaccgcgcgagtggcaccgacctctggtacctggcggtggccgccacctatgtgctgccggagccggagaccgcgaaccgctgcaaccccgcagcatccgatcgcgacacggctatcgcgctcaagaacacggaggggcgcagtctggccacgcaggagctgggccgcctgaaactgcgcggtagtgcgggcagcctgcacttcgtggacgcctttctctggaacggcagtgtctacttcccctactatccctacaactacacgagtggcgctgccaccggctggcccagcatggcgcgcatcgcgcagagcacagaggtgctgttccagggccaggctgccctcgactgcgaccacggccaccctgagggccgccgcctactgctttcctccagcctggtggaggctgtggacatctgggccggcgtgttcagcgcggccactggagagggccaggagaggcgctcccccgccaccacggctctctgcctcttcaggatgagtgagatccaggcgcacgccaggagctgcagctgggactttcaagcgactgagcacaactgcgtaagtccagcccccggggttcagatggagtcttgggtgacacttaccaagtctcaggttcactacaccaccgactggccgagattgcaggctactctaaagcacagtctggggtccccaaagggagcgtgtagaaagggtgacggggtagcggggaggattggagggaggttcaaaactctagtggctgcctctcatctttttagtacaaatgcgggcgcttgtttaggactgagctccccccaaccccccgggcccgggctatcctctgttcctaaccgcttctccagaccagagtctcagtggacatgtgggcttgaccctttgagctaacagttactaatgcccttacagaaaaagctatcgaacctaaaagactcgccgccacaccccggcctttgtgccccccccctccacccaccccaccttccaatctctggctgcaacctatgtgatgtggtctgtagagttgtggcctgctccgcactggtaaataaatgctatggtgcaaaagccgctcgcagaccgcccagcctgaaccagcgcgagggggcggggctgtggctagccaagggtggctgtggtctcaacctggtggagagaaccctaggaggcagcttatggtgtacaaagcctcgccctgaaaaggagaaccgggtgtgtgtgtgggggggggggcggtttggaaagtgttggggtgctccaggcagtttctgggctgcagatttccagactagattgcggggctctctggcaccacccttgagctgtgcctaaaccaggcaaaagacacaggtcttcccctcagggctcacagggcagccacagcttgaaatctcgagattgacagttctttgaccggaaaatgaagcgacagttcaagagggtctcgctgatggggattacggaggctttgtgtacttctgcagaggcctttgccctcccaaggcttctggcaagtaactctgcatatggctcctgagagtgaagcctgctgagagcctccttaatcactggacaggattcaaagagcagaaacggagggctacaggagttgctattgttttgctgtaaaatgaatccgaggaggaaggcgggtggtagtggtggggagtcttggagtggagaactgttgcatgtacgtttattgtgtaccagggtgccttgaaacatttcccctaaggtatattgatatgcgggtagaaaggcactcccctcccgccctgcaaagcacaccttaccaaatattagtcttattattcatggagaaaaaaaaaggcttccggtcactcgctccttctctgctagggcaagcacatagccatttaatttcactactagtatacattagcaaatacacaaagagcacaggttgtaccccccccccccaatggtttagccttgctgtaagcatacaacttaatatttaatatcttcctttatatatcttcataatctaatcgctaaagtttggtaaatcactgcctttttttttttacttctctgttgaaagacttgaaacctcccctgcccccccccacgctccacgcgcccccattttactttaagtgttaggcagtttgtctgtggggttaacagcaacagctcagaggcccacagcaggtaactaccacggaagtccaagctttgccatctgacagctgtgtcgatgtgcagagccaaaacatttctcttgactgcatctacctagtgggtactggaggactcggtttccttccaaacccagcatgcatcctgaatacactcaaaagccagtttttggctcaatcaggtgttcctacttgcatcgggatggggaggggcaggattagtctagagctgtttatccttcttcctgagagagagctgccccttggaaatcaagcaagggataaacacaggctgccaaaaatctggaataggggggaaaataaataattaattaaacaggtccctgtacagtgcttcttgctcctgttatttattgagaactcccagggcgcccagagctgtgtgttctgaaagatggggtctctaccctctgagcttgtcatccaagttaaatgatatactcaggttcaaacaatagctttccttggctgcacaggtgggagctgggagtttgccttttctttccttttcttttcttttcttttcttttcttttcttttctctctcttttcatttaagtaaactctctgctcctggaatgcattaaaaagctttaatgggattgcattttaagaacatttgaatgaaaaaaaaataggtggtagttttgatgaaaaaaggccacaatttgctaaccaattaaataggcagataagatacttaactcaacaaatacttgtttgatggcctgcttgtgtgagcctgtgagctatgctggatgccaccgactgtgccagcaaagagacaatagcaggttgcaaccctgtttaatggggtcatgggatcagtgtggcctcggttgtcactcacggagaatgttgtcacggagattgcatttctttttcgggtcttgaatgtgtttttgagaggcgtgctgaattataggtgcctgaaacaggagttggacctgaaacactccatagagggagccccagcagactgcaacagctaacccttcctagcaaacacaggctctcccaccccgattttctttctttccttcttttcatcagcaattcacaggctgccaaggctcaagtgtctagatttgcttgccttcttctatcccctcccttgccagctggtacctgtatggcccatcttccaccaacccatggtaatgatggcactggccaggcagtgtttggtctcttatctcccaactgctcattctcgtccctgctgaggattaatttctgagatgcaacgagtgtgtactcaatgtttcacacacaaggcactcccccctccctctccccctcctcctcctcttccttcttctcctcctatttcttaccttgccaccaaatttcagtgtgtgctttcacagagatcatccgttagctgcagaccccaagcccaccataatggccaatctctgcaggcccactctctgaggcccctgatgggcatcagagtaacaggccctcccgtagagagttttgtgacagcttgacacaagttaaagtcacctgagaggagggaacctccatgtgattggactgtgggcctgcaagcctgtagggcattttctcagtaaaggcttgatggggaaggacccagcctattgtgggcggggctacccctggctgctactcctgggttctataagaatgcaggctgagcaatccagttaagcaacacttggctgtggtgctatggcctctgcatcagctcctgcatccaggttcctgccctgactttcttcagtggtgaacaatgaggtgaaagtgtactttaagcaaacccttcccttagtagcttgcttttgatcatactgtttgaccccagcaaatagaaaccctaactgatatccctccccaaatgatgcttccgtgagtccttcagcaagcccgacaggctggttctgtgaaaagcatcccattttccagattgaagaagctatggtcaataacaacatgaatgccaaagtcttgaagctcaaacctaggcctcctggtatatagctctgtattcttttggccatcctggttcttctggaaatgtcccctgaaagttccctaatttaaaaaggcagaaaatgattgcccttagggcagtggttctcaacctgtgggtcgcgaccctctgggagagaggtgaatgacccgtttgcaggggtcaccatgtcagagagcgtgtctttatagtgcaattcataacagcagcaaaattgcagtaatgaacttagcaatgaaaataattttatgggaaggggcgtgtcacaatatgagaaactattaaaggtcacagcgttaggagggttgagtagcactggtctacaatgtgactttgagagtagagggtaccttctgaagacagtatttgccactaattttatgttgagctttaaaacattacatggcttattttcttcattatgttctacaatgtacctgtgtttagattaatatagaagtgaatgtttttaattatgtgctttagtttatgaagttaatttaactacaccccttctggcacaggaattcccgaaaggtgtgtttgggtctgtgaagatagattatgctagatttgtttggctgcctcagttgggtcctagggttgcctatggattaaatacaactgttagccctctgtagaggctattgtattttctcatagtttggcttatagcattgattctttagttctttctatctgttgcaggtagatatgtacacaccccccctttcttcacactcacacaactctgatgtaattcagttgtcatgcagatatgcaaccacaagatgattgcatagtctccaccaaccacagccaagacgcatgtcactactgtgaggtgatagcccagttctacttggcagtgtgacccgctgacctcaaaatacagtcttcctgtgtttattaccctttcagtttttgttatgattctgtacagccttttttttttttcatctgtagactagatgggcaattttacctttacacacatctgacatgcaaggggtggattaacacaggacaagtgtaatgatggagcccacttagaaagtgggaaaaagcaatcatagctgctatcttctgagcagttatcatggctgggtttgtgcagagcaatttacatgccttattttctgttgattctcagtcaccatatgaggcaaggactttagttattatgatgattatagatgagaaaattgaagcactgagagcttcggttaggttcctagtttgcaaatagcgaaggatttagagcttatgtgatcgggctctaggacctgggtttttagccactgctgtggacagtcagtccccacagacgatgagttttagtgttcagcctatcctgtgtggggcaggcgaggctccaattgataagacaagaccagctgtttgtaggtgatggagcagagaatccttgtttgggaacagagtttttgagtttacatctctcaccatctgaattactgtctggtgccccgtgtggtttctcagccattcatttttttgctaatattgtttttggcatttgggcctgtaaataaccttcatgagtgttacctcttcaagccccagtacctagtgcagtatctgttgtgcagccagacactaagaagtgtctattgaatgaacaagtgacggctcttggaggatcaaattggaaataaatgcactctatacttagcggcaatattgtcctggttctggtcaccatatattcccttactcgtcttccttttcttaatagctgatgtgtttaggattccttctcttcagcttcagggttagatgctatcctatctactctcccggctcttcatagcaatagccagactgcttgtgttacaagtgtgggaggcatctttggccatagaaacctccgtgattggtatttctgtggttgatctaacaacattccaattctagagggaagagctttttgttgtaggtcagtgtttcttaacatgtggtatatggaccaccagtgccaacatcacccagagatttgctagaaatgtaaattcttggacctaacatagaattactaaatcagagactctggaagtggagtaaggctggattcgtataagtttcctacaagattgaaataaacattccatactgctggggagctcctgaatcaggaagacaaacaactcgaaatagctttaggaagaccctgaagctgaccagattcatgaggtccctccctaccagactggaagctgagctacaagactttcagacaaagcaagctacgaagaagactctggaccccaccagctgcctgaaagaggcagagaccagccaagctgtctagaagaggtttagattacctgagggacctagaaaatgaattcttcaacctgttgagctgcctgcaggctatgcagtgccacttcagggtcccagctttgtgagctgtcactcatgctggggtgggctttggtgatgcagctgtctttgagtcatttctgctcctgtaagtgaccccaataaagctcacggttcagcaagttggttcagcaagttggaatttggtgctatcggcactatggtctgtcatgggctgtctccctggggtgagtagacaggtgtgtaacatttctccaggaaaagtcttgtcacacaaaacatcaggcaatttttgggtttccttattttattgtattcatttcctatgtatgggtattttgtctggatgtgtatctgcgtaccatatgccatgcagtggccttgtgggctaaaagacagtgttagggcctttgggactggagttaacaggtggttgtgagctgccatgtgtgtgctggaatcttacctgggccctttagaaggacagacagggatcttaactactaagccatctctccagccttcagtctgtatttttaaacaggcctcaaagtgatttgaattcatgcttcaggaaaagaaagtgaattccattgtgctccaactgtggtgcctgggaaggaggcattgtctcatttttctcccttgtattttatcataaaatgcctactaagtgctcacccaatcctgttactcctattctctccaaacatgtgattgcccccagcagaccctgaggctggattccctcagaggagaatgatagaggagccaaactgaccaacccttgactataatagcatgatttcatctgtaacagtgtgacatcatctataatagtgtgatgtcatctataatagcatgacaccatctcacttccctcaaggtttccttatgacttccttaaatatgtgtaggcacatgaaaactggaaagcctcaaagccaccatggggacaattggttggaatcatgggtctagtttatttaccagagccaggggaacaacaaacatggaccacctaggtctaccatctttctgtctctcactcgaaaacagacttctaagagataatgataaaataaagtatcagtttgatctgatatactcacaaattttcttataatattaccttcatgaaatactaatttgccgatgtcttagggttttactgctatgaatagacaccatgaccaaggcaactcttctaaaagacagcatttaattagagctggcttacaggttcagaggttcagtcccgtatcatcaaggcagacatgatgcaggctgagagttttacatcttcatctgaaggctgctagccgaatattgactttcaggcagctaggatgagggtcttaaagcccacacccacactgacacactccaaggccacacttcctaatagtgccactccccgggccaagtatatatgaaccatcacagccaatgttcatgttaccatagctgattcccccctccccaacccccattacttgaaaatagctttcccctgctccttccataatatatcaggattacagttatctctgtccctctattcctctcagttcctccccacctccccagccacccaggttcaccatctttctgtctctcactcgaaaacagacttctaagagataatgataaaataaagtataataagataaaacaagagctaatgcatcggaataggactaaacaaacagaagaaaaagagcctcctaaaaaggcacaagaaacagatatagatgcagagacacacaccccttcctcattcgccataatcccataaaaacactaactgggagccataataagcaaaggacttacaaggtagacatttacacatatatattatattacatataatatatacatgtgtatatatatccctgccacaatattgtgagatgaacttctaaagatgccattggactcattttctattggccatctagtgctgggcatgtggcctaccgtgaagagtagtttgtttcccgagtaagactgccttggaggaagctaaattttcattttcaagcggttatcagttgaaggtggcttctgggctagagatggggacatgggtacacttctcttttctgctgtaggaccccatgtggcacagagcagtgcaggctctgtgtgtgcatgctgcctccatctctgtgagtctgtgtgtgcatcaatcctggtgatgttccccggagagcctccatcccctctggtccttatactctctctgccttctcttctgcagggtctgagccctgattggggtggggagtgttaatggagactcccgttaaaggcttagagtttcaacagtagctggtttaatgtattagttcctctgctccactattgcttggagtgctttcttcagagaagttagtggttggggaacttggcactatttttagcccaacaaccatgctgttatacagacttcaaaacttttctgtaaagagccaggttgttaacattttactctttgcaaactactcttaatctcttaattatggttaatctcttaatcatagctactgacctcatgttgttctctgaatgaagccagggattggtatataaataagcccacagagctagggccctatgaaatattatggacactgaaacctgaattccttctcatttttatttgtcatgaattattctcacccctccccctaaatttcaaatcatttaaaaacgtaagaactactcttggctcacaggctattcgaatacaggccagatgtggcccactggtagtggcttgccaatggctgctctcctggaaagttggggaggaaagcaagccttctccaaggctgctattccatctagaaggggccatgacagaagggcttggaagccctaagcaagggtgtcatcatcagcagagggagacccagaaggctccagagcaggggcaggacgcttgagcggtgtcttgaagcttagtgaagaaggcagacaagggagtgctggagagcatccagcttgctcgcaagtgggatgttgaatgagtctctgagccacaagccacttaccctggctggggagtgtccagaattgagtgtgcaggaccagatggcgaagggcataatgagacaagcaaaggtgggtaggtttacccggatggtcactttcagactttccaaaccttgctttttaaaataaacacttgcccagaagctccgtgtgttccaaaagaacagcgggtcctctttgacctgctgttccaggaaagagccttgccaagttcaggggtgctaggtgaagcaggttgcaaagtccccagatcccacagcttgccccaccccccacctgcatccatgcgtcatcttcgggatttctgctgagcttggtgggaagaccaagactgaggatttagggagcagcaagaggtttagaagcacacccaaccccagtgtgttctagaaagatcactcacgataaagtgggtaaagcaactgattacaaggacagccattggttcacattggctatttcttgtatttatttatattcaggggccagccgtgtgtgaaagcaccgctctcagcactaaatagggaagataataaacttgtagcaaataggtattttttttttacattaaaacgatagctaaaactttagaagatgccatatagcactgtatccctctaatccttaccatacttttacgaagtgaggcgttttgtattccccaattcgcagatgagaaaacagtgatgcgttgttagggggaggtgggggtgtgggggggtggggaaagttcttctgaagacaaacaagacttcctgagagccacaaccccatccccacccccgctgcgcatgcgcaccatagctgggtgcctactttgccaagaaacctgagggccagtgcaagtgctcatgggaggacaccctggtcagtgtaaagagaaccttgagtgtagttaagggtgtgagggagtgaagaggagagtggcagtgggctgtaggacgaagtcgcagcccttccaacaggaccccctaggctgtgggaagagattagattttagtctcaaagcctgggagagctttttgaagggaagcaggatgattggatttgaatttctaagtaatggctggcctgtggggaatggctggccctgtggaaggaggagagcctgcaggaggctcttacagtattgccgggacagaaatgatgttgcttctagccaagagtgagaagagaggatgcaaatggactgttatttactgtcataagccgacggataatgaggacctgaactgcattccggccatgaacacagaaaggaaggaggggatgagatagctcattaaggaatggtattgaaaagtgttggcagcccgttagaagatgactttaattgctgttgggttttggttgcctttgggacatccagaaagaatgataaaagaggcattgtgacaaattttaggaatttgttcccccaaacttagaatatgttaggctcttttaggctcaaacagccctatttggactgtgtgtgccctgagtggtattttaatctgctctcttttgctataacgaaagacctagatcaagctataaagagtggaagtttatttggctcaggatactggagattgggaagtctattgccatggtcctggcattcagcgagggctttcttgctatatcttcacacgggcaagaaaagtgggtgcagctcaaatacccccttctgtggaggaagccactaatgtcatccttttgtagaaaagatttattttcatttattcatattggtcctttgtctgcatatgtgtctgtgtactttgtgtgtgtgcagtgtctgtggaggccctggagagggcatcagatccctggaacgggggttacagattggcatgagccaccatgtgagtgctaggaattgaacctactacttcttttgcaagagccatctctccagccccaatgccatctaatcttaacagtctccaaaggatcccaccttcaaatatgaatgacatgtggatattggggttctgctactgacagatggactcttggaggacacattcaaatcatagcaaggggagtggcctggctagttcatcccattctttcccatgatgccatcgaacgcacagtgattgaacccttagcaaatgattatacaaactgcaaagaaggctctcctcatctagtggaaaagacagtgataagagggggctgagataaagggttccaagatggggctgtgtttacaggaataataaaagccaggcagtctgaaaggaagggtgtttctggggacttcctgctcagtaaggcagaatttcttgtcagggcctccctacccccagcctggctgaagaagtgtgttatctaacacgccagctgttctccatcattgctcagtggcctcccctgaaggctcctctcttccactgtgaccccttttaagaactggattccaagtactgacccgtgtttctctgaggcagcgggatgggggaaagcctgaagcagctggtaaccacgggtgtcgtcttgtgtcaggctcccatactcagcaatatttcttttcttaaccctatgggagtcttgtgccatgggcctctgatgaaacccatagctcctaagcctatttttaatgcctcaaataatttgggctgccaagtaaaccaattatattgctatacaaagatgttactgtgtagtaatatatcttaacacattgaacagctaggtctagcagcagcaaccactataatctcaaagtagagatgagcttaaatgatcctttgagatattcgcagtaactatgaaatgataagaaagtgtctgatttcttttggtgacaaaggcatggcttcatttaatactgctgtggactgaatccaaaattaggggaaatgctgcttcacttagagctgaagtaaagatgtacctgcctcctcgcctgctccatggattccttgaattctgggcctgaactaaggatatgagtagaacttccactctgaaccattcattcatttacgtctgagaaaccatagtgtgaaatgtaaagtgtctcattttgtttcaaagcccacttgatttacttgcctatatttgtgagcttactcttatatgtatttatagagcagacatttagccaacaacaagtgaatggatgaatggaaatatggatggatggatggatggatggatggttggatggatggataattgggtaggtgggtgggtgggtagataagtgggtagatgggtagatgcatgggtggatggatggatggatagataagtgggtagatggtggaaaagtgggtagatgggtggatgaacggaaatatggatggatggataagtgggtagatgtgtggatagatggatggatggatgggtggatggatagataagtgggtagatgggtggatggatggttggttgggtgaaaggatggttgggtgagtggtaggtggatggttggatgaatggatagataggtaagcagatagacaggtaggtgaatgagtgtatgggtggtgggtagaaggatggatgaagaaaattcagagaggagaaatgactatctaaattctctcaactcctaagaaatagagcttgactgtgaatctgatagtttaatctcttgttataactttagagttgaaatttctaattctttctacccctcccagcttcactagtaactttcagagttgaaagaatgttagcgccgggcgtggtggcgcacgcctttaatcccagcactcgggaggcagaggcaggtggatttctgagttcgaggccagcctggactacaaagtgagttccaggacagccagggctatacagagaaaccctgtctcaaaaaaaaaaaaaaaaaaaaaaaaaaaaaaaaaaagaatgttagctatactcacaaacttaaaaactgccccttgcattctctctaatactcattttttttnnnnnnnnnnnnnnnnnnnntattttgtaaaccaggttggcttcgaactcaaaaatcctcctgcctctgcctcccaatttttatttttatatcgtattttttgttgttgttgttgtgtgtatttgtaagcattgcatggtgcacatgtgggagccagaagttgttgtgtgtgtatgcatgagcattgcatggtgtatgtgtgggagccagaagttgttgtgtgtgtatgcatgagcattgcatggtgtacgtgtgggagccagaggattacctttagaaatcagttcccttcttccacatgtgggtcctagggattgaacttaggtcctcaggcctatcagcaagtgcttttacccacgaagccattcccctagccctgaattaagttattctaattatgagaagagacagcttctttattttgttcagagcatgtgtcaaatactttgttctgttcttagagtcacattattttattttgttacagttgcggcttgtatgttgctgttatgaggccatgtgtctccatacagcccagtctaagcttaagacttgaaatgtaacccaggtttgcctcaaatccatgatctttctgccttagcctcttggatactgggaaataaatgtgtgcatgaccacaaatggatttagagacacattttaaatagtggtacactcagttactaggctatctatggatcagaagctgtctcttgtgagttattgataagctgtggatatgagattaggtttagatacctggtatgagaatgtggggaatagtaacttactatcgctccccaacgcagaccaagacccactgtttacaagggacaaatcttgcctcggttgaagaactctgtaatgattaaacctacttagcagtgttccttacttgcctgatgagatattgattgaaagtatccaaacattgatctatgtgtttatttattcattcaataaacacttatcgacatcttactacaagctggatgctgaggtggaggctgctctcaaactagagaataagacaaactgtggtagagctcagagtcttctgggagatagacaataagtacaatttttaaaacaattataggtattctgaaggaaatgagctgactgctatgattcagagtaagaaccgggaatgaggagagacgagttcctgggttgctgaagagttagcttaaaatctgaaatatccaaaagagtcggtccacagggaactggaggagaagcagcaaagaaatagcgtgtggcgagacctgaggtggaaagatggcaatgcatccctgaaagaaagctgctgtaggagcaaaagcagcttaaaggaggagagctaagggatgtctctgcagtcatcaggggaccagcacaggtggggtctcaggtctctgggtataattctgagtgtaatgggcaacattgaagactgttgaggaaggtctaacttgtcttaaagaccaccttgactgcaggatggaggacaagttgtggttttaagtgagagaacagttgatcaggagggaggtgctgggagctcagcctgggtagatgccatggagaggaagaggaggatgggctggagaatgctggaaaatctggcttggataacagagccagtcatgggagcagaatctctgggattgactggtggtcctgttgactgtgttgagttagtgttgaggaacagagtaacaagagagaaagcctagacagcatctttcaggaactctgaagccgtgcacggatggggtggttctcatgacacaatgacatcagtgtgtttggagagattggggaaggtacttggcacttgtcggcagcatgtagggggcacttctggcatcttgtggagagtagaccaagatggcccaagagacatacctcaagatggaaatgactccactcagaacaccattagctttctcgtggacagattttggtggactacctccttcggtttaagaggctggaggatcccgtttccatgctgcctaccattcatagcttttggggaatgatttaagttgtcttttcaaaaacatttagctgaaattacctagagggaagaaaagagatggtatgaaccaggaacataaaacccgaaggaggaagtagaatggtcttggagagggggctttagcagcaggtaggatgaggaagtggacgactcagggcaggaatagaaggacatgtgaagtctgtgcctctttcaagtgtcttctgcaggggagctatcccctgagacattgtcacacagctcttccctcagcccccttctgcatcagcctcctgcacaccttgggttcctcccatgactctgaatccctatgaaaatgtccccttggatggccccatacatgtcataaacttagctggaacccagtcgatgctgtctgttccagaagaactggaagaacgtgacaacctgagcagctaatgaagtcccactctaacttgagtaaaaggtttgtttggtttgtttggtttgttttgtttccagttctttagcttgatgacgatgacttcctaattattgtcatgcacacgatgtcacttgagtctcgcggcagtgctggagctaggcggggcacgaggtagggatgtgtccattgtacaatgtggtgacccgaagaaacccacttgcccaaatcaagcagactgtcagagactagaaattggaattcagagtcttactaaccgggtccctgatgaatcacaaatagcaaaggatggagaccctgtttgaaaacaagagtaacccaagggaacagaatacaagatgaactgcccaagagggcattttataaacccgagaaattaataagcaccagctgccattcattcgcctttgtcttataaggaaaaaccaacctcaggagtcttcttagcactgggtttgagtaaaaagctcaactctctctctctctctctctctctctctctctctctctctctctctctttctctctctctctctctctctctctctctcggtccccagcactggaggcccagctttgtggatatttcctgtgtgccttactgcaggaacttcattgggtagaccttgtatggcatctttggtcacctaggaggcaaagctgaggctgccttttcatgtcctagaaatcatgactggtgctccctttggacttgtgcagtgaacagtgtggaccacagctctggtgatcactgcagacaaaaatagtatgacatggccatcaaactactagatatgctcactactccttatgtactggcctgcatgcatgcacacacacgggaacatgtccatcagcccatgtcctgttccccaccctcgatggcctggtcccaggttgccatgttgggtccagacctctcagtctaatcatcatttgagagaagggtgctttttcctctggctgagagaagtttcccctcagtgagagctaaactgtaagcgtgcgagtggttatggtgagacgcggcaggaaggagaagtggagggacagctctgagggaaccgggaaaacccagagggagatggggcttagagctgaatcgagattggattttgtcatgaaagacagaagtggcaaaagcatcattatgaggcattaaccttgttacacacagacgaacaagcagaggcagggactcggagagaaattacacataataaactaggcagaatgggctgagagcaacattagcaattacaccctaagggaagagaagggcaaaatagaagacaggccagaggcaggaaggagtgagaataatttctggacacagggggctgcttgcacgatttcccctcttttctgcttgactccctaggtattaagttcccgtttgtgaggaggtttctctgaggccctctttcttctgtttttccctttgctaaaatgagagtaagaaaagcattctgagggttcctttctccattcacagggacctgtccatttctctgtgtttttagcacaaaagaatccatttccattcatccagaccggtcctgggagcttgctggggggtctaagcctctgccctcctcttttctcccaggctcataattagccacagagttctgactactgcgaagggcctcttggctggcccactgctagatccaacaagttatggttgttattccttaaacagtgattttcaggaaatcccatggcagctactgtggttaacttagtgaaaactctgtccccaagaacctagggcccattgtgtttctcctgcgctaatctccatgagctggttttcgtcctccatcttggatttagtggaagcaaaatgtcttcctttttctacgtgcatatcttatgcctcttgtaactgtatcccaagggagggcatgagaaagatccaacagctcacctgcagagttttatcagtgaggaaactatatagccaggaacccttccagggagctccttaagtctcactgagtagccctgggaatggacagccatagttctctgtgagataggaggacaaatgcctggtaatggtgactggaatcaccatttggttggaccaattatggcttctgtctagcttgggttattgtgatctgaaggaaattttagaagaacagctagctgtcttgggtgtggtagcaactgtttgcctttttaaataaggtagtggccacaagtacagcttacttgtgtgtaactgtgtgtcaggcattttaccaaacgaattcatttagtccttataagaacttaacaactgtgaagaagaaatgttattaccaacccttccacgatatagagcagtagttctcaaccttcctaatgctatgacccttttattacactgcttcatgtactggtgactgccaaccacaaaagtatttagttggtacttcataactgtaattctgctactcttatgaatcgtaaaatatctgatatatgattccccatccccacccctgttgagaaccacttgttatagggctgaaacaatacatttaaagtcccttagctagacaataacagggcccaggctcaacacaggtattgggctctttgtctggaaaggtggtaagtacacaccgtatagcaccctgagaatatccatgtgctaggtagtattactcatatgatcacttaaaaccacctccctgatgctgcagccctttaatacagctccttatgttgtggtgacccctctaccccaaccataaaattattttcactgctactccataactatagttttgctaatcttatgaatcataatgtaaatatctgtgctggaaagctgtgtggtcttaggtgacccccataaaagggttgtttgacccccaaagggttcccaactatcaggttgagaaccagggacttagagtgtcatcttcttaagtagcccaacagtcaggcacattggccttatcagacagtagagaaagccaactcaactcagattcagtaagtcaccagggttatccggtgagcgagaattgagttcaaaggcagagtagacccgggtggtttgtcccatcccaccagtctctcaagtaatacaataatgaatgattgcaattcgtagctgtgctattagtctcaggcttatttgaaaactacatcttttgggaagaagtcagaagtcaaaggagaatgggaatggttttcctcctgttcctgtccagcttctggccagcctatgtgacttggggagagtctttggcaagcaggctatctcccccagcctcagccaaagcctacccaggccagcactgtccatggataactggaacagaaacggctatttggttcctaccgcagaccagacctaagactccagtcctactcggtacttgtgggtaatcaacaatccacagcccttattccttttgtgttgataagaggtgtagtcctctattaagaaatatgatagtgtgagagcattctcaaagctcagaaatgatgccctaaatctctgacttcgcttctctatgatgctcaaataaacaataaataataaacacaataaatgatcttacatttggacaattctggttttattttaagccaggatgtgtgatgtgtctgtggggtggggttttttgttttgtttttcttttttcctttttttttttttttttggtttaaaggtcatccaactttttttctgctcatgatcacgaggcttccttatctaaacagaggtctattgttccagtcctcagacctacagagatcttttttcctcaacttcacttttaacaggataactgctcaacctccccaatggcaagagacgtaaggtcttttcacaggaaaacataaatgtctaatgggcattccagaagtctccttcaaagggagtttactatatagcattttatgcaaatgagacactctcttaggctgtggcattccttccttgaaacaagccggggtatcggagggagctactctcctcacttaccatttcctcacaggacaacatcaacaaagaaatatcgatggcgcttttaaagccttcagaaatcaatttagtccatgaatctatttagtttagatgttaatgaaacttggtggctttaaaaataatgaatatttaataagacataaattgaaagacataaacactgttggcaataatataatgaagttaataagtcttggacccccatgtccatctccctgctccccaaatggccccatctcaggagtctctatgatgttcactgaagtttgctgcctctcatattggccgcaatttaaatgcgcctttgaaaaccgtaatacggttgggaatcgggctgtggcagataaagtgagctatcacactgtgttcagtagctgcagtgggcaacggctctctcttagctccctatcttccagagatttgtgtaacaaactcagcttcctgtcttggaggcaggaagcagcttggggcccttcattccttttaaacaaaaaagggaaagatatcatggttggtactctctgggcccttggtttaaggaggggctttatttattgagcaggagcaagcatgtgattccacgtgctcaaaacctcatacaatttcaacgcatttgggttgagggtttgggcttttcacttccgctttaacagcctcagctcagggcccagttctaccctgttcctcattagctgggtcactacatattatcaccatccacagtcccatctgccttctgccctttttattcatctttgggcttcgccctgcactttgtctatttagaatctctcctctctggctctctgctgccccactgataggaccctgctgcctaataggatagtccgaggtcactcttgggacatgttcatgtttctggtcacagaagccaatatctaactaaaatgaactacagcggagtcctgcaaacaggacagttacctccccagccccagttcagaaatggcttctcttccggtgataatgcaaactctgtgtcttagagcaaacggggttgtgccaggcacgtgacatggatggctagctcggtgctggcaatcagaacatgtgaatatacagttaagcacgacgctctccgtggctcgggcaagccaggagagttggcagatgaggccagtgaaggctgtccctaaggatcccgttgaagagaatgtatctggggctcagaaatgcagacttcctaagggtttgcgagtggtacttcatcaatataaagagaaacactgatgttagaaaatgatcatttttctcctccttatttgttcctttctgtgtagaaagaaggggatcggcctgaacgggtccagccaattgcatcgtctacactgatccactctgacctgacgtctgtttatggcaccgtggtgatgaacaggactgttctgttcttggggaccggagatggccagttactgaaggtcggtttctctgtgcttcttcgatcagatgtccagttttcataagctcctcttagtacctgcctacctattgtaaacttcccctcaggctccaccgagtcctacacaagactctacctaacatggctctgcttgttctgaaaaagcaacattgtagcaatctgtacacagacccaagcaacattgtagcaatctgtacgcagaccctccgctcctgccacctcacactgtcaccctgcaatgaggcactagccgcctgctgtctgtataggaggcacaccgtgcccccttccttactcacggctgctgggtgtgatgaatgctgctccagcccctaccccatccctgactcaccttcctgagacgtttaacctttcagttctcacaaatcaccttatttctcacaacttcaaagagacacgagattagaggcttgaaaagaaaaagaagaagaagaagaaacaggtgtgccctccttccagcccctgtgccacccacagagggggtttgttttctgccccctgtacctgtacacaccagggagaggttaaagatctgaaattcttccagactcccctggcctttcatctcataggactgttttcccccatggtatagatgaaccttggtcaagctgagatttttttttttaattcacccagagggggaggggcagcggggaggaggaggaggagaaagtcaaatcagaaccaccaaggggttcatctgaaattactcagcggtcctcttgtcagcatccttagcaagcatgaatggcgtgtctcccgtggcctccagcaacagccgtggctaggaaccgcagtgtctgtcaccctagactggtgacactgcttgaccccctctctcagcagccactcagttgaccctcagctcagattcttaattgaatactggcagccctgtttgccaccccccccacacacacaccccgcagccgtcgcccctcttcagctagctgtgcctttaaggcggatcatttagcctctcttagcctccatttctctaaatgtaaaatgagattatactaggcaagacaggaaaaaaaaaaccaccccaaccctttcctcatctgatggctttgtacccacagactctctccagcttagcttgtgagccgctatgtggtcctgtgtccacacttgatcatacccacccctagccggaaatggcttcccccttctttctattctttactgagttctctaattggctccagtcctgccttctctctgacggtgtccaagcccccagaagtgtcttgctctcctcgtctcctgagctactcaccaccagcacccttccttgactttatattgatgtcttgccttgatacctagcctctgtggtccatgtttgtcctaccttgagtctaagcttcctgtaaagggcgccatgaattccctcagcctgacacaatgccgagttctgggtaggcatttgattgagtctgtttcctttggaggaaacccagtaacatatgggagggaatttgtttgtatacacattctttttaaatatacattgatcatctttctccttgagctagtttcatttcctggggaaaggagaggtagatagagaaatacccaccaatctttgcacacttgacacacaggaatgcctgtggacatactagcctggtcaggccaaggaggcccattaaccctgcagaggaagtttctatccgtcttgcctgggtctccttaccaattatctcttcagatttgggatgtttttgacaagtgttttgacaagaacactgtttccccaagctgagcctaccagactgtcacacgaagaattggaggtgaaggaacacttgcctataaatagtcccccatgggatggcttggcttcccttgtcctgtggattcagatcagccattcgtgtgtgcagctgtccgagtttcagtcttgctagaagccggggggtgggcccaagctgcagcttcacgctgttaatagaaaggtggttgcgattaagtcttgccgtcctcatggtctgtatggggtaccactttgagacccccatctggtctcattttcagggttcaattaacaagggtagacagatgtttggtttcagtttcatgagtttacatttctacagtgtttcctgcatgttaaataatccagctctctcaccagccccattttacagatggaaacatggaggcctagcattgttgagtgattggacaaagttacaaatgggcagtgcagggatttgaacttggaacaatgtcagaggctggattcataactctctgctgtggggacattgcagtccgtgcctcagcttccaggctcctcctttgggggctcttagccaggggatggtgtgttgggagggagccagccagccagccagccagccgaccctctgattgagggaacccctgacctgacccaggattaaccactccccatacttggtctctaatagttccctcccacagcaggaggctctgaggggtgaggctgtctccctcccaccctactctctagggacagtaggtaattcccttcatactgtctcttgtgtccatgtgcaaattcttggatatagcttttgaaatgacttggagatggccccaacactccccccaacacccccaaatagaatcatgcccagatgatccccagatctttttattccaaagaacctcccattcctcttgccacacttctccccagaaccgttagggaagatgaacactgagagacacaagcttggcttctaagcctcttcctggaggtattaatggacaccagagaagcgaaccccgacctgctgccgacagcgggaggaggaggaaaaaaagggctcgcatcacccacagcctgactcatcagtttcgcagtgatcaagaggcgaaggcattttgacatgtgccaggcaccgtagtatatgcctggctggatctgaggcaggcaaccggcagccggttgctgtttttatcaccaccagtaagaacctgacttcttccgtctctgcaaacctcatggagttttaatataattttggtgccattttaaacctcaggctatttaaataatatttttttccctgcttgtgaaagaactataagctcacgtagagagttgcagggtagcgggggataagaggaaggcaaaataaaaatgatctttaattgcgtcatgtagaggcaaccactgtcagcattttagattctttttttacatagttgaggtcagactgtatccagttttgaatcctcctttccttcagctaatgagggaagaggcttatattcaaatgctgctgcaaaccctttgtaaacagtatttttaaatagctctatcatggtgttatatgggaacacaattttgaacttgagccgagatactggatcactctataaaaagtctttaaacacacacacacacacacacacacacacacacacacacacacacccgttccaaagaagacagtactgtctccaaaggtaagatttcaatgatgagccatgagaaacctagagattttgtggttgctagcacccttattaccccacttctgcctttgtaaaatggtagggaaggggaggaaatgtggagctcaaaggtcctgccctaccaacttctccgcaggtgttttgggatcctgtagcaagtcgcaccccacctcccccatcatctttccattttgccccctttctgaatatggttctatgtgatcattttttttaaagttgtcagtatctctactgaaatcagctgaaagtgtgccgactctgaactcagtgtttgaaaatccacatggcacgtgtcacatggggtataccatcctaggaacacatgccatatcgcttctccaactgtggtggagtctgtcgtgtgctttggactcctttgagctgactctgttgcctgtaagaatattctctcctaatctcaagggcaaactgggagatttttgagcgtttccaggtggtaaaaaattaagtaataaaggaatatgcatgaaatgtgaaatttgtaactttatgcatgcccgttaaccttccttataagcataaaagataaataaggagggagcaggtaaggactaataaaagccggcatttctgagctcttactatgcacctgccgtctgaaccagcatcagcatgggttaattcatttaatccgtatgagtcaatactatgaccatccccactttatcaatgagaaatcccggggctttagggcattaggcagctggttcaaggtgatttgaactgaaacaatctgtccccagagcctgggcttttctcctctggcaaaactgcatttacagtttaaatgtaatctctggagcttgacagagtgcctgggatgagctgtggacttttctgcctggtgtgagggcaactgggcaggtctcgagacaccagtgtctgaggtttcctgagaaggggccttggtttatgtggtttttactttgttcctacttggggacagttttgagcagctgagggctcagcccctcttcttgggactgcaagtggctcgtggggacctctgtacagccattagagctcaggttttcccatgtaggctccttttgaagaacagtaaacattctgaattctgagctagcagtgtttgaatggccccctgataggagagccagggtttcccaatttccttgttgctgagggagtgtgctggcccaggaagctatgtcatgcatgcatgcagcagaagggtattgctcgcagggctccatcagccctggcagactgtattgttaggactcgactccatgaagcaaagcaagtcagttcgagagcttgcttccagaactcaaaaacccacaagttcctgaagaatctctctagaccgctggctattaaggtggtcaagtgaatggaagagagagttttcaaataaaatattttactgtacttccacaaaatgtaaaagtggggggggggaaggacccaagacaggcacagagctggtggggagcgctgaacaaattaatgggccaaatagaaaccacaggaagtgccaggcttagaaaagggctccgtggttggctgtgtagaatgtcatatgaaacttatttcagactcactccattacaccccagcttgtgagtctggggactccctgactcggcacagttagctccaagtaacatgcaggtctagaactcagaattgagccccgtgcttctctaactgactatcatgaagagtagacagagcttcccctccttcttcctgttttctctttagtattcctaactccaaaggcccactacacttttttttttttaaagattcttttgagtcagggtttctctatatagctctggctgtcctggaactcacttttgtagaccaggctggcctcaaactcagaaatctacctgcctctgcctcccgaatgctgggattaaaggcgtgcgccaccacgcctggaccactacacgctgttagataactgttttgtgtgcttaggggtgaggattaagtctccttcccagtgtttctcaaaagccattttgttcgaaagaataaacaggacaattggctcatttacccttctgctgaccagcttcagagaaggagaaatgggaaatgaaatgtcttaaaacaccttagccttgtgagcacggcttctctatctcaggccatcggaaaggaacaaagaagttaagtgtttcacttggtttcttttcttcttcatcttcctcactgtggagcatggagctgtcctgtgactctgcggtggaaatctccactcgcttaattttagctgcacggctgggaggttttcgtatgcagcagaaatctcagggctagttaatagcctaccacgaggtttcaggaagatgacaacagaaacaagatgttgacatgaactgaaattctccatcagggaaaatttcttttctacaaaggccttggttggaagaatgtgaagagctttacaaaatcttgaatgcttaatagagtagcatttgacttaataaataaatatgttttctgaagcctcttctgtaactattctggttatttgggtacaaaggtgagtcaaaagagcggggtgtgctaatcctagcacttgggaggcagaggcaggaggagctctgtgagttgaaggtcagcttcgtgtatgtagtgagttccaggccaaccagggtcacatagtgactcagctatctcataatacttacaaaagtgagccaaagagacaagccttgccttcctgctgagtgtgtgcgtgcgtgtgtgtaagtgagtgtgtgtgtgtgtgtgtgtgtgtgtgtgtgtgtgtgtgtgtggtgtgggtgggcagagagatcagaggcagaaaacaagtaaattaatcatccaatggtaaagccatttagagagtaattaaagtactgagaacaccagagggatggagaaagaaggacaatggccacaggagagaggcaggcaatcagggagagctgctcggaggaggtgtggctggatgatgaggcatatgtaggaatatacacagaggaggcacagagtgacttcagattagatctatattaaggtcgtatgctgagagcaacaaataaaaacctgcaccatggctgagcagtgtgtcgtgtgaattggacgaggtttcgcttatgcaaaattccacccattttgggtagctgtgactcatggttctttcctgcactcctcctctgatcccattctttttccatagctgcccagccaaactggcccaaggagcaatgtctcctttgctttagcctcggcggcttttttttttttcctgcatggatatcctcatgaggtctgtgactgaaagtccaagaggtcccctgtgcccctggtctgggggcctgggggaagtgagcagaacctatgctggccattgagagatgctactggggaccgcagaagccaacgtccctgacgctgactgtagtgcgtttgtgatctttggaataaaagttcaaccttcccattgttttcctctccagcacgcagaggtcattgtttgcatcatctgtttcacccgcccaccttcaaagattaaagaacttaaatttaagttctacgtatgaatctcactatgtagccctggttgacctgtagactaggctagactcaaacctccagcagatctacctgcctctgcatgcctggtttcgggaattaatgttgtgtgccaccgtgcttgaccttatgtctgtatattttaagataatacacggacattgtttaaaaccctaaactactgagaagtacagagtgaaatctacccattcccaacttcccattccaggttcaactaatgaaagaagtgtcactggtagctttctagtcagagtatacacacacacacacacacacacacacacacacacacacacacacatacacacacacacacacacacacacatacacacacacacatacacacacatacacacacacatacacacacacatacacacacacatacacacacacacacacacacatacacacacacatatacaggcaggcaagcaagcaagaggggatgtatttttcccctctcctatttttactgaacttgtgtatagctgggcagtggtggcgcacacctatagtcccagcacttgggaggcagaggcaggcggatttctgagtttgaggccagcctggtctatagagtgagttctaggacagccagggctacaaagaaaccctgtcttgaaaacgtgtgtgtgtgtgtgtgtgtgtgtgtgtgtgtgtgtgtgttgtgtttatatgaacgtatatttactataacatgttaaaatacttgccttctaactattctgatggctaaagagtactctactttttacactactgtttaggtaaccctgtttgtttttacactattgtttacagactcctattatttacatagttccctacgtagatctttagttagctctagacatttacttataacaggatgttacaatgaatatatgtgaatatgtctgtgtgtgtgcccacacgtgcacacacacacacacacacacacacacacacacacacacacacagaaaggcttctgggcccaagaatacatgctttataattttcatgacaaattctagatagtctcccagatggatcctagttccagcatccctgtcacatacccattcacacccatcatctacggtgagcacgccgtgcccaggaactcgtttaggaaattgttggtaggtcctggcaaggcatacctagaaacagcaagtgtttttgagaaagaaaggcttccctgcctcatttggattgctgaaggatgctggtgcctcctcttcaagatgtcaagtaaacagatccttggcatagccctcctgtcttcccagtggctgcaagcgtcgatggcgcaagaccctgtaacagctgcgagacagctcccgacgcaccaaccacggatgagggatggtgtttttctaaattattttatgtctcttcttattttaaagcaaatttcagacactatgacatttaccccaagatatttcattatgcctctctgagaaattattatcgtgttcccaactgtgactataatgtcattatcacagttaacaaaattatctgtaattcctcaggattatctactgaatatagctgaaatttcacaattgattaaaaatacacttaaaattatttggttcaaatcgatgtctggggcacacttgggtgcctctggcctaaggcacccctcccacttaattttctctctcccactggcttcctgaaaagccaggttctagggcctgcagtggctctcatgtggatttgcctgtttgtttcctgtgtcatttaagcttgctctgtgacttttgcttccgaagctccttggaagttagcactggagatttgactgggttcattcaggttgaaggtcagagttccgaatgtggtacagagagcttccctgaggaggaagcctgacaggatgacttcctgaaataggacggaagcagcaacctttcttgggccttacttgagaatcctgtcagttttttttttttccgttgtttaacttcccccctccctttccagaagcccagaagctgtttaattctgagctaagtcatagtgtaacttatgagttggtcatgagttagcaagtttgccacttactggctcggtgcctgcttgcccccttgggtccaggcacgtaactcttttctatagggccaccttgctcagtggaacatttctgtgctgatagaagaagtattctatgccagcacttgacagtacagcagcactggctgcgggtgagctgtgagtgcttcaggtatggctagcaggagtgagaaactggactttcaatggaatctaaatagccttgtgtggttagtggctaccatcttggaaagcacagctctagagtcattttcaaatgagccacagatctttcctaccaccctgagacctaactgctgctattttaaaagtttttcccccctttgattttggtttttcgagaagggggtgggtaggtgaggggtaagaagtgattctctgtgtagccctggttgtcctggaactcactgtgtagactaggctggcctcaaactcacagagatcttctttcttgcctctgcctagcaagtgctgggattaaaggtgtgtgccaccactgcctggctttaaaggggattttttaaaagtcatatttaatatatggggtcagtgagattgacttttactgagtgtctgcagaatttgctgagtagtcttgtaagattaggtgccccaaatccactagcgattgattaagcagatgatggtgtgaagttacagggcaaaggcagtgcctggaggggatgggtacagggagctgcctcctgtgctgaactgataaagagctggtaatgaaacagcaaatgccaaggtgccaggagggtatgctggggtagggatacaactgctcagtggacttgtgagcattgctttgtccaaaaagaatcttgggagtctttttttttctttttgagacacatatactatatgactaatgtccaccatagtagacatgtgggtattgggccagtgagatggctcaggagttaagggggcttgctgccaagcctgacaacacgagttcaattcctgggacccacagagcggaaggggagaaccatcacttgcaagttgtcctttgacctccttactcacatacccataccctcaccctgtcccccagagcacagaaaaataataaaaaacttcaggttaacagaacctacacagtaaggtattattagtcccagtttatagatgaggaaagggaagtctggacggttgagaataagttcaaagtgatacagtattgccaggtctaaaccaggcccctacctcaaatctccaagatgacagtagctgctcatctgacctgcgcacatggacccccgcctcttggtcttggcactcatctgtccaaggccccaatggcttcttgtctccctccagagtagacagcaggatccacacaggctgtagaacctgtgcccaccccatgatcactcactccgctgctcactgactcttttctgccttgttctgctctttcctcatcggcctcctcgtacttcaggtactctggactaactgggactctttaaacaaaacaaaacataaaaacccaaacatgtttgggctgaccagatgactcagtggttaagagccctgactactcttccagaggatgtgggttcaactcccagcaaccatatggtggctcacaaccatctgcaactgtagcctcaagggatccaatacccacttctggattcagggagcacaaagtatgcctatgatgcccagacatccatgcaaaaaagacccatacacataaataaattgaagcaagcaaacaaaaacccgtacaggaacctaaatgactgttgtaggcgtcactctctataaaagacccaccgtgagcctggattctccctttccaccttagcatctctgtaacggtcaggtgtaccatataattgttagtccacatttatagatgaggccactgtcgacccactccaaccccatgcatgttaagttcacgagggtgagatttctttcccaatctgttccctgcccccactctaccccatagcccaacactgtgttctctgccattttcctgagcaccaaacagtatacaggcgatcagtaaatgtttgttgaccgacgatgaatgacactcgggtgtctaattgccaaacctcagaatactgattcacacctgcatctattttctatgtaaacacacacacacacttctatccctgtgaacttgtcggggttgctttagaatgcatggctacgtgaaaccacagactaagccatgcaaatatatgttgaacagatactgcctttagcttcaaggtcactcttggagtgatcctaagaaagctgttaacttgcagtttctgatagagccaagctaagaacttgtggaaacaagcttctgcctgtaagaatactgcctccaaattgaagtgtggctatctgtgagttttttgatgactttgtctcttggccaaaaggatacactgtacttggcattgtcagccttgtggaagatggagttatgattaagaaatatattctctcacccagtctactgtctgcccccaccccatgcagtgtgtgtgtgtgtgtgtgtgtgtgtgtgtgtgtgtgtataccagcgacacacatatgaagcaagaaatgttacctatttatagaattttattattggctgaatttccaatggagagtttttcagagttggggtgggggtggggttgcttccaggtatcacgtgactaggaaaggatatggccttaggattaatctataggtcttactattctgatcttcagaatacttaatagaaattatatttctttttgtttttttaaatgaaggttgttcttggtgagaatttgacttcaaactgtccagaggttatttatgaaattaaagaagaaacgcctgtgttctacaagctcgttcctcatcccatgaagaacatctacatctacctaacagctgggaaggaggtaggtgaagctgctgcttactgctcctgacttatgaataggaattatctcactgatgtcattatacagtggcaaagcttttactttgagccgccaggtttaaacagcgctgcgggctttgagaagacctatggtgggccaagagagtagaattaaaacccgtagtgactgtcatcagtaactaagcaagaagtattacccatttagacaattttattattggctatatttccagggccagatttttcagaggggggtgtacttgcaaatgggcgcataatcagcagagtaactgaatttacacgtttattgtgtgggcactgagtgcttagctgcatttatgagtgtgcccaatgggactggctttggaacttggggttaataccaggccaccatctcatacacattcatgaaccaggaaatgtatatcactcatccccaccccgcaaactctttaatttatcgggatgtttgtctttttcttgtctctgcttactgaagtgaaaacaatatcttttcaacattttatctctaaaaggaaactatttttttttttttttactgaattcttacaatatggaagtcattgtgttttgtagggtctgtatgtgtactgggttgtgtgtgtgtgtgtgtgtggacacatgcatgtaataaagaatactaatgaaatatgttaatgaaattattactccacttatatatatgagcagtctaagactgggaaaggcaagcagttccaggagatatgtgtgtatatatctgacgtgtatatctacatgtagatacagatataacatatctctatgtattgtctttaacagggctagaactcaaactcggtcctgattctagaacccatgctttatcctggcctggtagttttgatccatgaccctctgaacacactaagtaagaagaaggcattcgggacttaaataattacacaatggatgtcacaggggcccttaccctccccccatttgtcacttcttcttttttagccactctcaggaggagagcaatgactgtcctacgtgtgcttgcctttttgagtcacaggctaggggtgacagtatcaagtattcttagaaaggccacattgctcttttcagtttggaaagttggatatatccagtgatcccattaagatggtctcacatctgactctcccttagcctttttcggcttacaccacggccttctgcgccggtctactcagtcaaacactgttatgtctcttccctgggatcccagatttgaaagacttttgtctattcaacaaactgtgtttatgaagtaaccattcccattcccaggctttatttatcaaggacatctcaaaactgccagccagagtactgactgtgctaccacgcaacgctgataaaattccaaccccctccccccaccaaagcaaagctcctggaagtctggcttagtctgtgcatatttttttccattttgcttttggagatactgcaaagcgctcataaattcccatccctatgcacaaagatacttgtaggactcagaaacccagtgctgtgggcgctgtagtaggctgtagaccttgtactgtgtgctgaagacccagtgctgtgtgctgaagacctggtgctgtgggttgtagaccttgtgctgtgggctgaagacccggtgctgtgtgcttataaagacacagtgctgtgggctgtagaccactgtgaaagcaccaatagttcatagatcttcacttcctagaaagtaaagacttccagtccctaatgacttacagcctgaagaccttagagacagttttcaagggggtggggagggtgtcaaaacgtgtcgtctctatattcttctctttagtataattgcaaaaggttctattgcttagtcaactgtggtaatcctagaacctagcaggcagaggcaggaggaagacaaaaaaaaaaaaaagcttgggctagatagggagaccctgtctccagaaaaagactgaagcaaaattctgctacttggctgtgattgtgcaagtgtgatcacccaagagtccaaatgcaaggagagcccttcctagactctaggaagttattattaattttaaaaagccatagaaaaaatctataaagtggtattaatacgtgcccactaaacataatcatatgcagatatatgtactgatgagaaataggttcacagtatattcattagagagcaggtctaatgtaataattatagtatcttatcttttacgtagagttatgtgggtgcttaaatatgttaaatttatagacagtataatttgaagaatgttctagagacttgtattctcctgaaggttcttagcaagagaacctcctttggtccattgttattaatgtctctacagtattacggtgctggacagattcaaaggctcgcaagtctgtgctaaggaaacttactgttcacgtttgctggaccacagcaccattttctcccataacagcaatagcgagtgcttatgacacaaattatttagtatgcttctgagactatgcttgtaataaccctgtgaagtcgattgtcctagtgccatctttacaggcaaggaaacaaggttagagagattacatgacacttaataaaatccctcagaattagaaagatgttttgtgagttataaggaaataaatatccacattctcgttaattccggctgcgcctgtcagcagcgcagaggacctaaaccgagagggcgcagtgatcctgcatgaagtcaacctagcattgaaggatcctcctcagatatgccttgttttcaccacaaactccttctagaattctccacttctctacttatacttcccagcatgcacagcatcccaggataatgagttgtacaagttttcttactacctgctatgtgatttttgccttcaggaaatgtgctaggcaccactcgggtactccaaacttacctctgcctcggctcacttccaagatcagcccagcaccattgactaactaatggaaagtgggaaagaaattatcttaacccccccgccccctttgtagtgctgggaatagaacccagcacctcgagctacacaagggcttggctactaaactaccctgtcagccctgtctcctctggtttctttcatttgcaaccccaatggaatgggtgtgagtcatcaagccaggagctgaagtgatggcgataccctaataccacttcatttccgcatctcttgccggactcatgctgatcattctggggcagagtcatcacgtatacccggatactcatttccatagcgccactgattatactgactgtccctgtatgaaaacgaggagacctggctccgtgatccctatggaagtaattatccacagatcagaacctgaatttgggaggactcacttgagaaggctctaataatatagactcctaggctctgcccccagacccgggaagggtctgggccgcaggggagtctgggaatacagttctctcttggtatttttctgggggttggattcacaacgccctcaaaagtttgcatataacctgtacatatcctcccatatacattaaattatctttagattagttatgatgcctgatagaatgcttgcctataatgcaatacaatgttaatagatataaatcaccctactgtatcacttagggaatgagaggattgaaatgcactgtgcacgtataggcacagtgttgttttcaaatgtgttcgatctgctcttggttgaatttgcgagttcaggcatcactggggtgaacagggatagccttcggtactttgagaagtttcccacgctacaccataacctagaactcgagatctgccattggatgctactgtggagacattcagggctcaagttgacaaatatactctttgtgctgtatgaccctccccccagcccccagtgttgcttgtgattccatctaatggatgccctcctcctttttcaggtgagaagaattcctgttgcaaactgcagtaaacggaaatcctgttcagagtgcttagcagcggcagacccccactgtggctggtgcctcccgttacaaaggtatttcctgaatcttttctcaccagctcacattttttttttcagaaagtgtcatgcggcccaacacttgttgccctactttaatgatccattccacgctgtgacgaagcagagctctccaggactgcaatgtacgatgtaaccataattcattcttaaagatggttcttgccatgtcagtatcaagtcatttgacccaggctacacagggccacccggtctgggccgtgacttgagacgggagaggctagtgcaggtgggtttgctttttatttcctaccaagttagccaagacttcagagagaggcaaaaggttcgcccttggagacgataaaaagaatagcaacgtttgaaatttttcaaatgaatcctcatcatgccgtgtattctgctcgctcggcggaagccttattattaatggcattgtcttcttgcacaccatatagccctgggcctgatgtacaatctcagtctccaggcagaatctgcccagcttggtcttgaattacgatgtatgcgacccatctaggctcaagggcgacttgtagcggcttcctctccatggcagttcttagcatcgtcgctgggaccagcctggttggattcactgttgctatggtaacccagtactccagctctcgctatagaagcaaggaggaaagagccttcactgcagctcaggcaggaatgagaggggggaaaaaaacaagccacatagcagtggctgtcagattggtgctttctgttttttaaaggtgaacacagattaaaaataaaaataaaaagagcagagcaggtagggaaaggcggagggcagagcgaagggacggtagggggaatgaagggcgatagagaagtaaattagagagctcctgggggggggtgcgggggggggggtagggagcgtgaatggagagggtgattatgatgtaagggagaggctcgggaaacaaactaaaaatatggagatggaatggattaagagttcttcatggaggaagtcacaatcttagctgctgcaagagctaggactgtggctgccctcctctctgcacccccttgcgggggctccttccctcagaatctctggcagacaaaagaaacagggccaagaaaattctcatgaataattgtaattggggtaggagccttttcttcttgtcacatgcccaagagtagacttgaagaaattaactgatcacagccagtattatatggttgctgtagttcttttttttttcttcttttctttttttttaaagatccattccatttatgttgcatctctgtgtgtctttggagagctctggacaggagttcattcatggatggtggtgacagtggtggtgtttaaatagccgtgactacttgtttaacaagcttcagtcaggagttggtgggagatgcccaagttggtaatagaattttggagttggttgtattttgatggtcctttcagaagccttaatagtatccgagcagggggcaggggtggtgctagctggaaagagatgttcaagagctgagtgctgaagtacgggagcactcaagtactagagcactcaagtactatgatgtttagaaacagaaggggtggggaaaacatgaggaaggatcagaaaggggagagacagcgtttaaggaaggagtgtgttgccaggcaagggaaagggggaagagagcaacgtactgtgccagctcctgccaaggaggtcaaaggaaaacggatccgttggactaggacagggcgatcgatgactgtgacagaggcccgtttttggaagggtgctggagctacaaaaggacaatgagcagtgagtggaggagctccttgggggtgttatggggaacggtagaggagatatgtcgccgattctgaggcaaaacgtagactccagacagtttaggattctaaagtttatttgtttttcattacattttaattgggagtgggatagtgcacgttccatagtgtgtgtggaggtcagaggaccgctcatgggagttgctctcttctaccagatggaccccagggaccaaactcaggttgtcaagcttgacaggtaaaagcacctgccacgctatctcaccagtctaactttagaaggtgttttgttttgttttgttttgttttgttttgttttgttttgtttttgttttaacatacatagaataatggtgtctggagctgaagaggtgatggctcagcccgtctgtaaagtgcctgctctgaacgcatgaggctctgagtttgtatctgcagcacctgaaaatgtcagccatgctagtgtatgtcagtaatcctagtgctggcgaagcggagacaggaggatccccggaagtccactggtcagatagtccagtcaaattgatgagctcttaagttcaatgagaggccacaccctcccgtaagcaagcgcaaacaggcgcgcgcgcgcatgtgcccaatcacactccacctaccagctttttttgtgtgtgttgttggggaaaattccggtaggaaggagaggggtggggggaaggagggtgaatattgtggtgtgttgtctttcagcagatgacagaaaatatgacctaatcacatcagtggggagggtagcctcagtccaggatgggagggaaacagtagtgtggaccccagagctcgtagagatagatcagacctcagggtatgtccatattgctcggaaccttctttgtgaccttagaccagcaggagccaggtgtctgtgtgagcccggggagagggagccgtgaaatctgaggaagggaagcaggaagcacacaggagctcaggtaaaggacacacacagagagaaaatagagtatggttgcctggcaatattggggcgcacctgaggccgatgatcttgcctttgaaacagaaagcatgggtttgctttgctcatgtagtctagctccagtcccatcatgggaaagtacggaggatagacttcagtttagctagagtttggggataagtacatcagggtggggctatgggatgacattgatgtcacctgtgtgcggtggagggaagtagggacacactgtggatgggagacatgagaggggggaaaacaccacctggactgtgtgggggtcaacgctgaggcgatacaggtgtggaggtaccgggaatggtaaggtctacaggactgttacgtcatggcagcgagggtggagaacaagactactgtgtgagaaacagggacctctgtgtgtcagtcgaagccaccaggaacaaggatgggcccactggtgaagagtaaaggacaaattagtcaagacctaaaactaactagtaaggtgggtgagtgttggtcctgtaggttttgtgtaaggagtcaggatggtatctattgcaaacatgaacttgaactctgagagatggtcagaaagagaggaattatgtggaggagggctgtcaggcccagctgggccacctctagtaagttaaaggaagcagccagccctctagaacagtggtcctcaaccttcctaacactgacactctttaatgcagttccttgttgtggtaacccccaaccataaaattatttttgttgctatttctttttattgttttttttttttttcaagacagggtttctctgtatagccctggctgtcctggaactcactttatagaccaggctggcctcaatctcagaaatctgcctgcctctacctctcaaatgctgggatttaaggtgtgcgccaccacgcccagctttcgttgctgtttcttaactgtaactttgctgtgcgatttgctattgttatgagtcatgacataaatctctgtgatttcctggtggtcttaggtaacccctgtgagtggatttttcaaccctagagaggttatgaaccacaggttgagaactgtcgctttagagggacatggggaagctgtgtcccctgggggaacagtgagccagaagggagttgttagagaattgggtgaggacagcaagccattcttaacagctcgctgtaaggtctctcttcaatttcccctgttcattatctcgctcccccacccttgctgtacactttccagtaggaatgatcctttaaaaaaagaaaaaaaaaatccccactagacggtgtcctccctagattcattgctcccaatttctcctctctcaaactcagcctgatctcctgcttgcagacaaggcattctgtgatttgcagctccgacctctctcatgactctctctccttggtctcactgattgtctttctgattcaagaatattcctgcccagggcctttaccttgaatttaaaagttctccattttagcacactcttcccttcaggagctctttatctgctatcctagaacgtatatctatgtccacttaactacccaacatcagagaagcaacccctacccactcagcaaacatagcggggtcatggttgacggtccttggtagccacgtcccctcacttggctcccagttggctccgttctggcctaagataaaatgaaactaagcttcagatctgtgactcatgttaagctctcggtaccattcaaaattaggaattctaaaggggatgtttttggtgtggtggcgaagcatcccactgtgtttattttaaatgtcacagatttatttagaaaaataatttcttctctgtcttgagaaggttgaaccttcttgtatacgtgtcttgaaagtggatttgggtatggtggggggccaagaaaatgataattaatttcttttttatttggtgttaagaatagtctcccagtgtaataagcagataaaaaaaaaaaccaactaagcaagcactgaggtctagtattttactgtgcgaacctcaggttcaacctgtgctgcagttgtctgtgggtggaaagggaattctttttttcaagctgaatatatattggagttggaagcagtttctcagcttctcccgtatttcgaagcccagcacatgtgttcagttgtggatttccagagaactggcaatcccgagccgatgagcccgacaaggttccaagagttcatttgcaagtttgcttggctcacacgggtgcctttcccacagaaacaatgtcaccaattgagggtggattcccaagccagcccacaaaatccatttcctcttaatttcaacaaacatttgttgaatacctaccaagagcccccatgtgggaagtgagatggctatgtgctgttgagaaaacccagatgtccttcttggctgtaaggggttaacaagcaaactaggagggcagacaggtctatgccagtgatcattcattcagccgtccatctgaccactgacatgtatgaggtacccacgtgttataagcctgacatcccattcagaggcacagttcccatctgaatggcttctctagtctaatgatgggtaagcgtcagtagattctgagtttcttttgtttgtttgttttgtttgttggtttggtttggtttggtttggtttggtttggtttggtttggtttggtttggtttttcgagacaggggttctctgtatagccctggctgtcctggaactcactttgtagaccagactggcctcgaactcagaaatccgcctgcctctgcctctcaagtgctgggattaaaggcgtgcatcatcactgcccggcagattctctttcagtgattctacctaatgagcaactgcctgatccttagaagtctaacgagcaggtatttctctacatttattattttcactcatggatgtgcttgtcagctgtgggaggaggaagaggtttgtgtcgtgctatcagcgaaactcaggtctctttcatgtgtctgtcattgtgtacctactcttaagtcagagagcagatgtagaagatattgaactaagttacatgatgcactcaaagcctctgcgcccatcatggttatggatattctactgctaacacaagctccacagccaagctcgacattagtagggtaaggaaatagaccattctattccgtccagtcagatgtatcataacatggcacggcaaatagcagtagagatgaatcattctggtacaggaagttttggagacttgggaatgtgcatcttgtctctctggaataaaggagatgaataggatagggggctataaggatagacacagaagatgtagggttccatggagacacagatagggcatctaactcccatgtgaaaggttggggaaagcttcctggggaagagatgattcaggcaaatctgaaacataggcaggtatcaggaagggaaactggctgaggtaacaggttggcgaagaatacacttaagttcctgaatgtgggtgtggatgcgtgtatggcatgtttggggggtggggataagaggacatggtcaacagggcagatgagtcgtttagattttgttagaagaatcttgtggagactgagcaactgagcatacaatctggagcaagatggacttgggtcctcgctgggagctggcagaccagtcagcaggtggttatagaaactggggctgggttagcgcagtagtagttggaagcaggtacattggagagctatttggaagccaacactgacgggacttggtgattaattgaattcccccttgagcatggcacactaaaaatagggccataaaatagaagatgaagatggccacgatggaagatgtattctttcttccttgacccaacattgcacaaagaaaagagctgacactcaaagaagctagattctccctgtggcccaggcactgggttctaaggagagcacccgggtcaggtgaggaggacttctgagagatggcagaggggtgtatgttctaactcttaccagcaatacatatgcagacatctgacttgggggaccagacagacagatgtgtccttcactgagcagggtgtaggaggggctatctacttggggtgagcggcaaacagcatcgactgccatattggcacactgggcaaacagcatctactgccgtattggcacactgaagggcacagcagggtaggaagaaataaagttcctaaggatgattcctatgggccgggatctggcctttgtatgagtagcctgtttctcttctacgccaaagcagggttgatggtggtacccatgtctggggctgctgagaggttgaaatcagataatatccctgaaactgcaggcaggagcttgctcctaggaagtgctatagtggatgtcagtaaggaggccgggtcaccctcagcttcagtgggagggtagcctgaaactgggcctggaagaatggtgtcaatttttctctgagggcagagggtatgggagattctacaagctgaagaagagctgagccagaggtctgtttagggagtggcaggttggatttttttttttttttttttttttttgtctctaggatactggttaggaaggaaggaagggataaaggtgctgggaaggatgaggaagtggaagctctgagtttagatttaattagtatgtgctgcgagctcattaaagagctttaagcacaggactgtatctttgaaagatttgtgacttgcaaagattatcgcgacggcagtcgagaggatgaagtgtatcaaggtgggcagcaactatacttacctcctgcaatttgtagagtgagtttatcttgtatctcttccggggtcatctgctcggtggctatttcttgggcccagttataacaatggaacctagactgggtccttctcagaaaatgggctatgcaggaacagccattcacactagttccttaatagtctccatgcacagggtagagacagagcccccaacatgctaattacagggtatctggatccctcttgattatttgtataaatttaacctcctcctatattcttctgcacattttccccaccgtggcaacagttggaagacattcaggcaacccctagaagctgttttgaaattttcatccactcttgggctgttctgcatgtgggattctgaaacatcatttctcagctcagcctagcggcaagcaccccatggtccagctcctgtctgaccactgacaggctggcaggagcagagaagggaaactttgtcaacagccgactgggagcactttctagagcccagcttgctctcctctcttgaggactctcctctccctaagaggcatttcttcaagaactctggtttaattggtagccctatgggaaccctgcccaccacgctgtgcaatgacagtccatggggcacagtacccgtggccatgctcttcccaagccccaatgaatgatctctgttgcagatgctgagcccgcagcatcctgctagccaaagccagccgagtgagctttctcagagagtcttccttggccacagaactccatgcaactccaccctgtgcctcctgctcattcttcctgacaccctaagcagtcaggaatcagtatgactgtcagcctgctttttagagtagaagacaggtgtgggctctaaggaatacttggtggcttcagagaacatgaattgtttttcccccctgaggtgctggaggtgaggactctgaagtggggtttcagtggaccataatagaggtggatggtgcttctccttgatgttgtagaaacacccccattcattcccctttctagcttctcgaggcacctcacattcctcctcagctgccccttcctgccctttcaaatcttaacgatgcagcgtctccagactctgctggttctgtactcctctctctgatctttgtgctcacatcgggctgcagaataatgtcaacccctaccttaagatccttaatttgcccaattttgcagagtgtccaccatgaaggtgacatcatagtcatgagtactaggttgtggacatctttagaagccatttttcaccagcctcagattatacctacctgggtttatgtccagttcccaagccactccattgtctaccattgtagggaagaggcaaagagacaggaaggagatggtgtccctcagagaggacaaagctggaggagcaagggcccgcatggacattacataataacctgtggactgagaaagagaacagaactcagggccctctccagttgcataaactactctgcacattcatccaacagatactgaacacctactatgtgtcctatgttctcagctctaggatttttggtgctctcattaagttacccagagtctcatgcaagtcttttgagcaagggattttagtttctcggagttaccataagggaagttgccacaaagttggtggcacttctgcaagacagacatatgaacccaaggtgtcaatgtggccatgtatcctgtgaggctctagcgcaagatctgccctctcacgtcccatggtggttcctgtggctccttggcgctatctcctgtgatcgccttccttgtatacatccaaacctctctctccttcctcctagcaagataccagtcagtgcagacgttaagcccaggataatcccaacttgagctccttaactaattacccctttaacgactgtatccaaggaaagtagcattcggagggtctgggtgggcatgtcatcagggaggaagagaccagtctcaaaattcacaaggaagttgcataggggaaggcaagcaagactaaataaacttgagaaagggaaagagggacactgagtaggagtggggaaagctggcagttttaaattgggggtcctggaaggccactgtaatatttagcagaatggccagcaagaagacacttggagacagaagatcattacatatctaccttccttctttccttccttggagctgaggatatgtcctcccatgtgcagatctcaggcttgaagcctgtgcagtgacacttctttatggtccagtgcaactctaatgacagtgataatgataatgatgagatttggggcggcccctccttcttgtgtgaggaccccattgtgccaactaattgtatagaagcaagtagggcaactgtctgtggggtggaagcagtggggagcagagaggaatctgctgttctggccttggggccttcctgaatgaccctgacacagcctgaacctgggcatctgggttactgtggatgctggaagggactcgggagaccttcccacagtagaatggggtcttgggacaagcgaagtctcctgggttctttatccccttaatagttgctggaagatccatgggctaagcctattgcactggctggttttatatttcaacttgatacaagttagagtcatcagagaggaaggaactccagttaaggaaacgctgccttgagatccagctgtaaggcattttctcaattagtgatcagtgggggaggacccagctcatgatgggtggtgccatccctgggtcctaggttctataagaaagcaggttgagcaagccagtaagcaacaccctccatggcctctgtatcagctcctgcctccaggttacagtcctgcttgagtttctatcttggcttcctctaatgatggactatgatctggaagtgcaaagcaaataagtcctttcctccccaacttgcttttgggtcgtagtgtttcgccatagcaatagaaacgaagatacctacttgccatagaagaaaaagaagcacacaattgttgaggggcacagctccactattggccccacaggcagttggcagttttctgtaccttatacataagccagtttggtttgtttggtaaaagttggccacaaggacctcaagcctcagcatttcaactcccgtacttatctgcaccatctctttaagtgatgctctaacttccaacaagccccattaagagcaccccttctagtaaatacatgttttaatggaatagagtttttttttttttcctaatgacctatctgtggcagggcactttcataagaacgtattgatcggctttttaaaaattcctcaaatgtttccacttgtctctgtgacctcgtgtttgtcctgttctcagcagctcctccacatctgaacacagtgttcagatctgcattctgagccctgcctgccagtctttggttttgctctcgtaccatcttgaaatgctaggctgtttgcattctgctatttggagtgtgtgctgtttctgatagttgagataggagttgatatgaacctcagaggaagggctaatagtattgctcccacccagtcattgctagggaaatgggccctcaacacctctacagttcttcctaatgacatagggggtgtataaggtagaggtagaagccagaccatcctgggccaagaggcatcactttctcttctgtctccatgctgcctagtttttctaaatacctcctcaacattcttccatgtaaggtctataccagaattgaaaactgagaacttttggtacaccgcacttgtcacttgacgaagaactgcatagagtgaaggccacacatcacttttgtttgagtgtttcggtctgcaaatgtgttttaggtgggctaaacagctctaagtttcaagacaaagactgattttccacaatgccagttaacagactgacctaatggacaaaaatcaataaaatgacttaggcagatatctggaagacatggagaagaatttagtccctttcaactttaattctcagcccaattcagataaactttgctgaacaccagcaatggaccagacccttttctagattctgggggaaacaaagatgaacaaggctgtgtaccctagagaataaaaaattagtgtggggaggagacagtcaataaatactcttaatagctgatgtttgagacacaaggagatacccaaacccttttctcctgggagatggaagagctgtaaaagtcttggaagaagccttgggctgtgcatgcctttgtatgtaggaacacattctacgtagtgaaccaatatagaaaagctatgtgaatggacatatggtcaaccttattactaagacctacctagtcattagcattttgtatttgtttaaggtacaagttttctgactctgccatggacattattgctgtcttagatactgctctattgctgtaaagagacactaagaccaaggcaactgttaaaagaaagcatttaattagaagtttacttacaattttaggtggttagaccatgatcattatggcaggacacagacaggcatagtgctggagcagtagctaagaccttcacatcctgatcccacaggcagcaggcaggaacagtcagttagacagttttggtccggtgtgggcttttgaaacctcaaaaaaagcttaccccccagtgacacacctgctccaacaaggccacacctcttaatccttcccaaacagttccactaaggagcatttaaacataggagcccatgggagccattcccactaaaaccatcacagtttcccaggcaaaactgatgggaattgcttcctaatatgtgtgagtgtggaatttctagtcccttaagataacactctgcaagtgttcagggttggcatatcattcatccttgccttggtaagtcacaaagcatgcataattgaggcccccagaaggcttgtagcaggggacctatttaatttcatgtgacttctatgtcccaaacttcttggcatgaacactatcatctcactttgaaaatccagtataacccatattttcctttatggatatgtcctggggaaaccaagtgtcacttgggtacttacgatgttcctactatggaagactataaacattttagagacagtagagagaatgtgagggctgttgacagacaccatgctaactactctccatgtaccttagtatccttctgtttgtcatggaggtggtaacaatgataacctgtttcatgaaggttaatgagttcttcccactggtcatagaaatagtgggagagccatagcaacgggagggtgttatgttgtgtatgcctccatataaagcctgtattggaaacagtccctagcataacagtgttgggaggcaggaggttcatacatatttaggtctacactcatgaatagcccaatgccagttataaaagagactcaggctgcaattctgatttcttactatttcgtgcacatacaccttctccttcattgctgccttctgccatagaatgatgaagcaagatggttctagctggatgcaagaaactgaccttggacctcctatgggcccttggagttgtgaaataaataaataaataaataaataaataaataaatttcctactcatgacattctgtcacaggggcaccaaatggtgtaaggaaaagggccccttggtgacctgttgtattgtctactgcagtgtcgacatggaacagtggatgcaaaaatggtcttggaaagccatactgcctgatgcactatctcaatccctctgtatactaacagcaccttaggaaagcaatgcggagtcttgtaaaagctgttccccctatctgttaatcagggacaatcatggtaactacttctttagtttagtttagtttagtttagtttagtttggaataaatgagtcaagtcatgtgaaaagacatcgcatggcatataagacatttttgccttttctaaaaaaaaaaaaaagtagtctatatttctgtgttattagcatcattctctcaaatagactgacttgcagacccagtgatgaagagccagttgttttttttttttcagcttccttagcaagttattttggcatcctcccccccccccaacccccctgatcctgactctaggagcctttaattcagagtttggtttgtcacagtgacttcctgttctctttcatttaatggagtctgactccttcatcttgtggactggcaactgtaatgaatgtcacccgactcttgagaccacctggtccctcctttgtgtgctgtacctttcctaaagatgtacacccctgttgcaaatcacttagcaaaggaccttgggatgctcttggagcaaaccacccccctcttgaggatgcagttgcccatgtgagaggagcagagctggattgttggtttgttaaaagttttctgataccttatcagtataggatcttggggacaggtcacactcaccccacgttcaagccaattacctgatatttagttatcgaattccttcagggactgtctgctcttggtgaacaattagattagaggatgctgatgaaattctggtggcaggaagtgggagttacatttctgagctcagagtttctatttcaaggttgagtaagtggtaaatttttactgagggagtctagcctaatagagtcagattctcaaggtctgtccccgcccccaccctggcgcagtacgtggatggacacttcaacctgcctggaaaacttcaggtttcaggttttcggaagcgggcctccctgtccttcatgttggcatgaaaacaattaataatttaagccagacccattttaaaaaatagaaatgctatacaaatacaataacgataaatttaaaagtcgatccagttgggcaccattcccagactaccaactgagcagacacacaaataagtaaagaagaggaaaaactgctatataatgcaaatggctgccatctccttgttttctgctgttcttttattgcagatatataatatcaaggctacattatgggtaaataggttttgtggcctaacccagaaaacctaatcacagcttataatattatttctatgaaggaaatatattttatattataaacagatggttggcaagcagtatttggagcacaatcagtttgtaaggctgggtctaccggggattttaacctttaacagaactggatgctcggatgttgaaaccacaaggcatcttagaggaccccggtgaagtgattctctccagaatcttcaccaagattttcatcttaaaaactgcctcccccatctttgttctttggttacctgagacccactttcccgtcttggctcagcctagccacgctttctaaattctgttgagaccccaggaaactgggaggtactctgagaggccttatcctgtgcaccttataaaatggtggccagggtcctaggaggctaccagtgagagagcctgtgtgcctctgaacctaggtcatgctagaagagtggttctcaacctgtgggtcttgaccccttcgcagggcgagtgaccctttcaaacacacatgtttacattagaattcataacagtagcaaaattaaagttaggaattagcaacaaaaataaagtttggggttgtctcaacatgaagagttacattaaggggttgcaggatcagaaaggttgagagtcattacaacggaaagagaactaacgggaaatcactcagataagcacccagcacaggtgctgttgctgccatgtttgggttgtggagtttttcaggtatacgatgggctacacagatttctactgacttcggaagcaaactcaccacatcggagtggtttctgagtgtcagagagtgagcttagcagtgtccggaagctccattggccacttgaggctgagtagcttggaacatgttttctgggttgcagatggggaggaggatccattttcttatatattcgggtggctgtattaaagtctattattattttgaacaaattgagtctataacacatttctagtaagctgagaagagacttcttaaatagttgcatgcactaattgttaccacataaagagttttcacctaaggaaagtttttttttttttaatttaaattaactttttaattcccttcaggaaatttttttctttgcagttggacagttttatgttctaactttcaagtagatttgtatctacttattgacttgatcacgtaggcatgagatctaactaggaataggaacaaaataaaataaaacagtgagttagagttttctagaggaaccaacacacacacacatgtatgtatgtatatatttatttatgtatgtatgaaatcagcctcattgaaatagtacaactgctatctcatatctgagaacctggtaattgcttggtccttgaggctgtgtgcctcagcagttagagtaatcccacaatgacagtctcacaatggggaagctgagaacccagtagttaccaagtctacaaggctgggtacgccaacaatctttatctcctgccaaaaacttggagtgtttctggagagccactagtccccagtcaacaagagcagcctggaaacaccagctctaactctaatgtcaatgaaggaaccagcagcagcagaggcaggtgaattaattaaagcggcaagatggaggaccaagtgagcaaaatatccattttaatttgggctgctaccaggaggcaccatcctctttcggggtggttcttctcagatcaagcagggcagtcagggctgtcctccggtgaggctttttactcaggtgattctaatttgtgacaagttgccattagggccaaccagcacaaatagcgattgctttcagattgatcctattgtgatttaaatatgttccctgcaaaacctgtgttctcctggagttgggaggtggggcctgttggaggtggggcctgttgggaggtgtttatgaatgagggctctgtcatctccagacaggcttgagactgtgagttctgtctctcactctcgcctttttcttacccttccattatagggtaatgcatcaaaacatgcccttgccaggtctgggtccttcagccactgacttgtaaaactataagaaaaaaaaatatattcttcacaaattactcagtttctggtatcctgttataattatacaaaatggaattagcctcataattggtactcagtagtaaggctgagatataatcaatacctgacagcgtgggcctggctgggaactggtcatgggtagaagctgtaagagcctgggacattgggagggggaaaaatctatcgcagtgtgctgattcctttaaaaaatatttattgcagtggtgtgaatgtacaatacttagatatgctgtatatatagtgtaacatctgtatatttaatcataaaggcagataattgaaaacattgtaaaattaagcacttcaattcttgttaaatatgaaacatttgtatcttgtaaataaagacatccttaaattggttttggaaaaaaaatatttatttttattttacaaatatgttagagcctgcatgtatgtaagtatgtgtaccatgtgcatgtctggtgcccacagaggccagaagacagagttggatgcctagaaactggagttataggcaaacgtgagctacccagggtgtgtgcttgaattgaacccgggtcctctgcaagtccagcaaccgcccttagttgctcagctatccctccagcccactaagggtcattctaatgtagatgtacagattagcaatgtggaaaaagcctgggacttcctagagattacaggcacggtcgtgatcagaatatttgtagaaatatggaaggtgaaggcctctgacagggtctccagtgaaagtgaagtgcaaagatttggaactgggaatagaggccatctatgtcagttcctcttgtgttgctgtgctaaaatgctagaccaaaagcaacttgagaaagaatattttagcttacagtagagagaaagaagtagtcatggctgggaatgcatgacctggtagcaagggtgggaaggtggctggtcacagttcatctgcacatgagaagggggaggggctataaacctcaaatcatctccctcattacataattcctccaacaaggctccacctcctaaataacctccccaaacagtgccaccaactgagggtcaagtactcaaatacatgggcctatgtgggacatttctcattcaaaccaccacacaaagacagtgtggtgatttgaatatggttggcccataggtaatggtactgttgggagctgtggccttattggaggaagtgtgtcactgcggttgtgggctttgaagctctttgtggtaaagagcttcttcctagctgcctgaggatgccagtctttctggttgtcttcagatcaagatgcagaactctcagatccttctcgagcaccatgtctgcctgcatgctgccatgcttcctactgtgatgatcatggactgaacctctgaaactataagccagccccaactaaatgttttcctttataagagttgtcatggtcacggtgtctcttcacatcaataaaccccaaactaagacacctcgttaacagttacaaaggggttggtagaactgtgcccatgatctaggactctgtgaaatacagattcggggtttctggtagaagaatttctaagctaaatattgaagaagctgtgtgattaccttttactgaaagaataaaataatttaaatacagagtttgtagttaaaagggaagcggggagaaatttttgggaaattctcacctggccatataaaaaatgaagaggcatttttagaagatggaattaggagcgtggccacgggaccacttactggagattactatatataaaaggcaaccaggttctagtcatcaagagtaacaggagaatgacctcaaagacactcttcaaagtaggttggacccttagggtaaagctgccagagaggttccttaaggtccccagcattcatttgccaggccactttgggactttgctgcttgtgttctggttcagtgttccttggccatccaagctatggctcaggcaggcatagatacagcttggattgacattctggagggtcaatgtggtagaccatggtaggtagcatctacttggtactagttttatacctatgcatagttcatgggctaggagcctatgatagccttcatctaaaatcaaaaggctatcacgggcagcccgggagtccatgcagaacttactacagggataaagggagtgtatgttgagagtatttactatagcgatgtctagaagcttatgggaatggtgtatcttctgagacctcagaattatactaacactaaacccttcagctgcaggtaccagacctaacttatgacagctactaaatggactaagcccatcctagcattagtagaactgcctgagtgcctgtgccaggatgtggtccatggacttaaaggaggttattctggagcctgaagagttaacgttctcctccttcctgggctgtagattacatggaatcagtttctgcacacttagtttttcttatggaatgagaatgtctgtctgcctgtctgtctgtctgtctcatctttgcattttgggagcacatactatatttacattcaaaaatctcagggccggagatgaatttgtctctggatgtatcagacataggttctcacccacagccactttaggtgagagcccagattttgagttagtacggagccaactaagtctttgggggctgttgagatagaatgaattttctggcctggttttcatgggagagggacatgaagttttagggtcagatatgccatggtgtggcttgagtatgtccttctcaaaagcctgttcgaaacctatactctggtcggtcagttttgaggggtgaggtggagattaatgggagatcaagagcaccccacccccaccatgaaagggagaaactagcaacagtgaattctgtgtcttttttgacatcctcttctcccagggaatgacacagccagagatgtttcaccagagtcaagtgcccagtcataactatcccagtttcttaagaaataaatctttattttttttataaatatatgagtctgggtcttctgccaaagctgcacagatccttggaagagggggagcacatgccccagcataagcaatgaacacatacacaaacatacaaagaacacacacacaaacatacaatgaacacatacacacaaacatacaaagaacacacacacaaacatacaaagaacacatacacaaacatacaacaaacacatacacaaacatataaagaacacatacacaaacatacaaagaacacatacacaaacatacaacgaacacatatacaaacacacaaagaacacatacacaaacatacaacgaacacatacacacccctgacattttctccagaacacacttgggctaagatgactccagtttccctcctattcaaaatggcctggcaaagtggaacgaaaaccagttaagagatctaggaatttggctgacaagagagcttgcttgtaatcctagcccttgggaggtggaggcagaaggatgagacacttgaagccatctttgccctcctacattgtgattttgaggccaccttggtctacatgagaccctgtggaggatggagacagaaactggagaaggagaacctgcccatcgagtggtcaagtggctcatcaatcgccaagtggaatgatattttcatgtcattccgggaatggcttgagaatttatccatttggccatttccttgatgggtccacaagaataagaacgatttgtttcaacagaaatcatcccaaaccccctggttttgtttactaagatgtggaagcgctgagctctgctccccctccttgagaaatgcgaatgtgtgggtaatgtgctgtcgagattttacaatctgcaatatttgagaagtaataagatactgttgttggttgaccatctggttatacatacttggtgttgtggtttgcttttttattctttcatttttattgttttaaactggtgaagggcaaagaatgagagttagaaaaaaattcagatttggctttcttatacaaacaaagaattcatatttagatgtgcaacccagttagttgttgtttctagggggagagtaaatgaacagtccagtatatatgttctttcattttccttttcaaaaataaataaataagtaaactaaccttaactcctaatttgatcttcagctccaaacttttggcttatgtgaaaatcagtctcgttgcctgaaagaggagtcaagcataaatcaaagctctagaaagaaaattcaccagcagaacggtcctatagagatttcatatttcatccattcactcaaaaatatttatcgaaaccctagtatttgcatctcgtgctggcagacgctgagggatttgctaaagaaacatcaagatgttctccctcccttccaggggcttagtgctttctcggggagaaatggcatggccatgtgaaacagttaagttgtaattcaagacagcatatgattaaataccaaaatgtgtggttccgacaagaaatgctatagttcagagaagggagtgataactttgtagcatgactggtttttctgcctacaaattggcaaattgtagcactatttgtatgaaatattttacacttgcttttttggcagccttaggccttgactcccagtcagcattaagagcctgcaaaaatatttgtactccagtcactgtagaattggcttaatttttctccccttctttctcctatgcagaggaagtgccttggtacaagccagagggcccaggagagacagggagttttgagtcatgaactttttcagatacaaataaggcaccagccttgtcattctctgtactccagagctgccatgctggcaaactccctctgacattgagagaggtctaatttgaacttaatgtctgtgacggacgagtgagccattatgggtcagatagatttatggccttggagaatcactaatgaaaatccctttggttatgaagttggagaagggctaacccagatgtaggaagggttgagacacatatgtgctcctggggagcccagttccctggtgggtgacaagctaaggggacttgggaatggcggctagaaaaacttaccaacttcccattctatatttgtcatatccaaatgagcacaaaactcaaagaaaagccataagactaaattgttaagaataagagagagatgataggtagggcttccaggggagggagggggacaccaaccctacccataaaaccttcgaccctgattacaagatatctggggataaagatagagcagagactggggggatggccaaccagtggctggcccaacttgactcatcccatgggcaaaaaccaattcctaacactagaaatgatgttctgctaagcttgcagacagaagcctagcataactagcctctgagaggcttcacccaacacgtgatggaaacagataaagagacccatagccaaactttaggcaaagattggggagtcttgaggaagaggaagagagaggttgggttgagggagctggaggggtcaagcacaccacaagaatacatacagaataaattaacctgggcccacgggagctccccaggactaagccaccaaccaaagagcatgcaggggctatacctacgacccctatacatatgtagcagatgtacagcttggtcttcatgtgggtcccataacactcggaacaaggactgactgtctctgaccctgttccctgcctttggctcccttcacctttcagggctgtcttgtctggcctcagtgggagaggatgcacctagtcctattgcaatttgatgtgccaggttgggctgatagccatggaggctgaagggaagggggagttgggggaggggtgggagggtgggactgggagaagaggagggctgtgatcaggatgtaaagtaaaataaataatgaaaaaaacagaggaagaagaaataaaatcttttgaagtcaatgtatcgtttgggccctttcataactgtgctgcccctcagtgattgctgtcaccatttaaatgtgttggaatctcatgaactaggagttcttagttttcttttaaaactccacagttgtttgctcaggctcaccttcattttaatctttgcctggaaggggtgtggtttctcaagctactccatgttactcgttggactgtctgcatggtgctgtgtcacttggcgatagggttgcacttggtgttcactcccctcattgggttggtggcccatctgggaagttaaaagtgacccggagtgacccgcgcatcaaggaagccagtgattgcagtgtgagagcatctattcatcaaaggacctggccctggccacagcttaagatttatttggggcatctcctgagctggctgacctgggagagtggccttgcaaaatattttgctcgtatcttttgatataatttggtatctgtctaaataaatgttctggagcagatggttacagaatgtcttatcatattcttgggcagactctgcccttgaaatattttcatttaatcatcatgttgcaaagctcaaaacagtagctttattatttcttttgagcacaaaatgaatctcactcaataggttggtattctggttaatgtattgcaagcctaaaatatattcaaaatataaaccttttctgggctggtcttaagcggaatttctccacaggcactctttattttagaattcatggaagagtatccttccatttgaagtatttgatgatgtcatcttgggtgatagcctagaagctgaagttcaacatgttgtcaacatttgtcctctgtccctaaacctgatgaaacacacacacacacacacacacacacacacacacacacacctctgctatttctttgttgcttttcatgagtttaatatcaaatcccttttctcattcaaaatcaatagcctaccatacaaagtgctttgtactactgatcatgagaaagctgtaattaatgtgtgtgtgtgacaatttatcagttggtgtcttttgtttgttttgttttataggtgcacttttcaaggggattgcacacatgctgggagctttgaaaactggctggatatttcatcaggacctaaaaaatgcccgaaaattcagatacttcgaagcctccgagagagagtaagaggaaataattttatttgtctttatgatattgtctttatgatatggtacagctgccttctgggtataaagaaaatcttttcacaatgaaataggcttcatgacaggactccattcattctgttggtgaatggtaagggcctgccagatgttgtctatctgcaaagtgccaaggatgcagtaatagccaggtcattcgtggtacagcccacccccatagaggctgccatcttgctaagtaaagatgacctttaggggttgaaatcaaagagaagatgcattttttttatgcagaagatatccagcttgattttaaaaatagaggaacaataagctcagacttatagttgagtagatccctgcaatgtggatctcagtgggattttattttgatcagccagtcttaataccgctgtcttcagtctttgaacaactgccggtgcaggagtcaagcaggagcatgcaccaaagggtgattgggtcccttggaaagctcctgacatggcgtgaaagagggacacagagagcgcattggagcagagccttccctgatgcccacacccaccctgccttgaggggaatagaattccttacatgatgctgtaaggagacatttcctccctaatcatggctcttgtgttatgagtaattgcacagagtccccgtcagcagccagttgacctgtcgactgcactcactgtgttctgtgtgaatgccacattaacaaggaaatgggccactttctcttctcgctttgccatttcaaatagcaagaaccacgccacttaagatgatttaacatttaataaaggaaagccagggcatttaatgagtgataaataataaaagaaccaagctttcaagtcatgaccgatcagaactcatggattgaaagttacttgctattgttgcttcctgtcactctctgaagcaagggcgagctccaaatctccaaactcctgccagctccgtgccagggggtcagaatcagagtaagtgaagttcagccatccatacacaggtgtagtcaagttcttttcttactgatctgaagaaacagccggctttgatgctaagtgctaggcaaaaagcattaagatgttttgatatcctcaggactctgatacatggttaagattatgcaaggagtttttctctttgtcattgaaggaactgttaagggtgatactataccttagaatagaaagaaaaaaaaaatagcttgcttaagtgccgcttatacagttagcttacctatctaggggtggtatagccaaatcaccatttacatgtcatctggaacatttaaaaaaacctgtttccactcactcaggagtagtagatcacccctgtaatcccagtgttcaagaggcaagggcaggaggatccctgtgagtctgagggaccagcctggtctccataataagtttcaggccagctaggactccatagtgagaccctgcatcaaacaacacagagccaaaaaccttgcccacaaccactcgttcccccaccctgtgtccccactgtggcttaccgatgggcctggccgtcttcccatgcagccattacatcactgtccacaaatcagagataagttctttttttttttttaaattcacatgctactatttcacgtgtgcttgtgcatgccatagcatgactatggtcagaggaagggtggagtgggttctcttcttccaccgtgtgggtcctggggctctgactcaggttatcaggcttgtctataggtatctttacctgctgagccacctcactggctcaatgatttgctaatttcccttcaggtcttctttaaaactatctctgcacttatcttcctcccaaccaagggattgaatcttatgcatgccagaggcaagcactctcccacttagctgtactcattagctctagattgttccttttaatactactgatgcggttcgacccctctttctctcttcagctctccctgctctctctttcttctcccttcctgctttactgccgtattaccagacctggctccttctgatcatgctgtttccacgtatttcttactccctggccatctgtgacgtacatgaaagcctcaggtcaccgtttcaatagtgcccgacccttacctaaagagatggcagtctgtggttgttcccaatacaatctattaggtaaggtcaaagagtatttgctagctgtccatcatatgcctgccaacatcctagcacctttgcaggtatggaataaaaaatacattacagaaccttggctcataagaagcattatttcattacccaaaagcagccagagaataggatgtcttcatcttcactgagggattcataattaaaagaattaattagagaagcacctgttagtctgggatggatttctctaaggtttttgttgagcagaaagaagaagaagaaggggatgtagtctcctattgaaccgaaatttcttgttggtgctcatctgtctccgtgtgattatgtgagcattgtcttagtcagggttctctaaaggaacataatttagagggagggaaggagggagggaggaagggagatatgtttgtgtaaatatatatatatatatatatatatacatatatatatatatatttaaaaagggatttactaaaatggtttatagactgtagtctgagaagtcaaaaaatcgatgtctcccaaccacaaggccaaggatctagtagttgctcagtacatgagactgcatatctttatagtcccaatctgatactggaatcccaggtacattctagaaagcgtctaggaagaaggctctgatagcggcaaagaaatgcttcagtaacaggatagatgaacttgctagcaagagtgagactaaactggcaaaaagcaaaagcttccttcttcgaggtccttttacgtgggctgccgccaaatgtggcctagatttacagtgaatcttcagatctcaaatccaagcaagaaaatgctcacagctgtgcccagttgcttgggttatagttgattctggatgcagacagcttgacaaccaagatcagccatcacaagcatggagatttgtatggaggcattggttccaagcgcggcttatgagcatggccttcccagttgaatggctagctaacggagaagggaggccagtaaaaccggaacccgagtcacggtgcagacatggtcccatggcattacacatgcagttaagaacactgtgctcaacacatacagagagtgttagtgttcagtgaaaatcattaaccaataagaatatgatggattaggaacagaaaacttttttttcttcccacaaaacaacctggtttctaaaggagaggtggcaaagagactcttccacaaatcagaacggaaaaaaattctaccagcactgcttgtgtcaacagtgtctcttggccagtcgtacaagaagcaagtagttgggggctggagagatggctcagtggttaagagcactggctgttcttccagaggtcctgagttcaaatcccagcacccacccacgtggtggctcacaaccatctgtactgggatccgatgccctcttctggtgtgtctgaagacagctacagtgtactcatagacataaaaaaaattacacaaagcaagtcatataaataattgaaatgaaatacagaaaaatgtcactgcttgctaaccctacactgatgcatatattctaaatatattcatttgaaaaaccattgtcagattccaagatgtaagttgcttgagagagcacacgctccctagcatcgccaaaatttaaaaatatcaaaaactacactaaataaataaataaataaataaaaatacagatgttcaatcaattctcagcattcatacagtgtgtcaggtaaacaactatcaacttccagtctttggaaaaaataattcatttataaaagcaatggaagtattcaggaacaaacttcagaaacaacatgtatttcctgtatttaaaagttacttttaagctgagcaatggtggcacattcctttaatcccagcacttgggaaacagaggcaggcagatctcttgagttcaaggccagcctggcctacagcctggtctacagagtgagttccaggacagccaaagcttcacagagaccttgtcttgaaaaacaaaaaccaagcaaacaaaaaacccaattacttttactaaaagacactttttggagacagctaccaaaaacagaatgttttttggctttgccacagtttgtctcagccattccccccccccccccccataataagaaggtagcagaacagagagtggtctgttgagcctatttatagtttgtcattgtataaccttctcaattagaaacataagtgtaaatagatatgtagaagatatctctttggaaagtaggaaaaacatctatgtatatccataaacatcccatgtttcttaggagaatttacttccatgacttatttttctagattttgaaatgagtaggaatttactttatattaatactgtatttatttggaataatatgagctgatttgaatatctagtgtgtgtgtatatatatacatatacatatacatatacatatacatatacatatacatatacatatacatatacatatacatatacatatacgtatgtatatatatgcatgaccactgttaataattataaacaaatgcattattacacaaatacattgtctgtttgtacagtatgtatataatggtcaatggatgacaacagtagttcttaatttgttctgactttaaaatagtaagatgattgatagaatacaactcaaagatgaatacaagaattttaaagatcagatgttataaaataaggagaactagaattttataaaaagcaatgacttacaaactatggaaacattcacttcataattcatgttaaatttaaaagtacataattcagggttgatgaaagggctccactgttaagaacactgccgctcttccaaagctcgactcctacgctgagtggctcacaaccacctgtaactccagatctgacggtcacttcctgcttccataggcaactacacacacacacacacacacacacccacacacacacacacacacacacagcataccctcacacactctctcttaaatacatacaagaaaataaaacaataaaatatttaaaaatatataaagtgaatctaggataattgagtaacttacataaagagtcacagaaaatggaatcatatgtcacatagtttgaaggtatgataattttctttagctctgaagtatgtagtgacaaaaaaaatatttatacaatcagtgtactttaaaaacagttttgggctagagtagtctaggcagtagagggattgcctagcttatggctttaaccctcaacactggcaaaagtaactatagaagagggaaaatgaattaataaggcatatatgtctgcaaggtatttgccatagctaaaatctctcaagacaagaaaactagggaaaaagaaaaagagaaagattaatacacgaaaaagcaagtagtcaaaggcaaacgtcctcaaagagcaggtttgggaaagtagctataaatatggaaataggttcaaccttgctagttatggaataaatacaaattaaagagataataagttatgccaacacccagtgttgctgatgccaattagcacaacccttttggaaagcaatttggcagtatgtctcaaaagtaataaatatattcagtttgtttaaatcgctaattccaggcatagaatccaagggagcaacttgaaagaagaaagccctacgcataagcctctatggcggcggcgtttatagcattagaaacctgtttggcaataaagagaaaagttaagtaaaataagatccttgcatgtccacatgatggaatgttctacagcagtgagttctttggccctgtgtttactgcagtctaattgattttccaaccatccctgcatcccatctgaccccagagtcctaccctttcctctttgttcagctgtgctcaacaaagagccatgaatctggtaagggttctcatattgggctggggaagctctcttagttacttttctgttgctgcaatcaaacaccaggaccaaggcagcttagagagaggagagttagcctgggcttgtggttccagagggacgtgagtgagtccatggtggtggggtggaggcaagggggcaaatggcaagaggggatgggaggcaggaagctcaccttgaactgtaagcatgatggagagagagaaaaaaatagtgccaagattttaatctcaaacacacacacacacacacacacacacacacacacacacacacacacacactcagtagtgaacttccgccaacaaagttgtaccactgagtgccaccaactgggaccaagtgttcaaaaatctcagtgccttcaaatcactatggaagccagagcttcagcttttaactgtattcgtcaggatctcagactatctccctccctctccctctccctctccctctccctctccctctccctctccctctccctctccctctccctctccctctccctctccctctcacctctgccctcgagctctgacttgtacacgatgaatgcataaggaaagaggaagagacaagacaacgaactgtcggactggaggcccgctgtgctgatggagtaggcttgggtctctagtgcctgtctgggtgctcggttcagcatcgggcccttgatccggctctggccaaggtcgaccctgtggatctcgtactcctcagtgtgcttgtgtgctatgtgggtttattttgtagggtatgctagtactgcgtattgtactagtagtctagtgtactgtaattgagtattgtgaagtagcttagtagttagggtagcaattggcagctgttgagatgtcgtgagtaggtagtgaatagccctaagtaattctgaggccttgcaaggggtttttcccctcttatcctggttgttcctccgttacatgctttgatctgcccgtgtttgaatgaacggggtagcttgtgcccgttaagacggatgaggagtctcagccacgattcaagagaaccacgagacagccagggcacaggtaatagcaacggttcatagcatgggtgcctggagaggatcacacaacgagctaatagaagtccgcaggaccccaagggcacacaggccgacgggacattcaccacggccggcagggacgctgaggaccccggaaggaccaaacacacccaggtagccgctaagccacttccgagagacccgcactcgtcccaccgaggcccactctccagtccagannnnnnnnnnnnnnnnnnnnctctccctctccctctccctctctctcactcatacacacacacacacacacacacacacacacacctttgcttcctgactctgagcccctcccactgtacctgaaagagtatgctggcttctatttcctacctggctgctccttcaccatcgttcccttgatcctgctcttgccaaggtcactgttgacctctaccctaaagtccttgtcctactgggatgattggcagtgttcctttataattaattaattaattaattaactaattaatatttgcttacttatataggtatatgcttgtatgtggctatgcatacctatatagggcagcaggtttcctcttctgtctctcttcacttactcctttgagacgggtctttccctaaacttggggctcacattttttttaccttagtctggaaggtagcaagctctaatggtccttgtgggtccacttggcttagagctgaggttctaggcatttgcagggataaccagccttttgtgtgtgtcctggggtccaaactccggtccttatgattatggagtgatcactcgaccactgagcacctcgaagtcctgaccaggagcattcatgaaaccccctcttccgttgcctgtgcataacacaccctgtcttagttactcttctattgttgtgacagaaaaacatggctgaggcatcttgtaaataaggcatttagttgggcttaccattacagggatgtaggtttactccgtgaggatggtaaaggcatgacagttcagacagcttagagtttgtatgttgatccgcaagtagacagaatgagacactcggaatgccaaaagtcttttgaatcctcaaagcccacccccagtgatacacctcctctaataaggccataccttctaatccctcctaaaaagtttcatcaattggggaccaagtattcaaatatatgagcctgtgggtgccattctcactcaaaccaacacttaacctctccacttctccttatgtcacatcacatcttgttgactctaggaaaaaaatatgtgtgtgtgtataaatatatatatatatatatatattatatatatattatcacatatattatcatatatatagtatatcatatatgtaataaattatatacacacatatatacacacacacatatacataaacacacacatatatgtgtatatatattccagtttggactcattctttttactctttgtccatacaatcttatccacttatccacttccatggctttatatatcttccgtacattcagatttcttttgtgtctagccagtatcgattgatcctctgaccttcaggcctatcttgatatatccttttgatgacatacaagtatcttgaacttgagagatccctcactcccttagcaagtcccacctcagcatatacttaccacttctgatgctttcatccatcagtcttctcaccagaatcctcacattcacatccctcccgccaatcctgttcatccaacctccagatggttctcctaattggtctgattctttctatttcactctgccactatagcccaggcttctgtcatctcttgatgatgtcttgatgccatgtgaccctctaggttgactctactgggatgtctgtctgttcttctgtaaactctcaaaggataaggactgtagttgtttagctagctggttacttggtgccttgagcagcatttggccatgttaggagcttgttatttatttatagaataaataagcagaatggtttcagttatgtaaaaattatgtgtgagaactggaaggaagtggggaataattaaacagctgacgaaaatgggatttagaaaaaccactgatgaaggaattcagagtaagagacacacatataagaaatatgtagttatgcaccagcgtgtgtgatggagagagtatcatgggataaagaattcaatatgaccgagagtgcaggcccctgagaagataaactagcaaggacagtttggagttcattcccatactcctgtgaacttgtggtggtacatgcctgttaacccagctcctcagaaggctgaggcagggggatcacaaatagaagccagctgggatgcgtatgtagaccggttgtaaagtgcttgcctagcgtgtaccaggccttgggtccagtccacagtgtcacagataggtaaaaaatgtctcatatagatgcttagacttcaggccaggtgaacttggtctgaaggaacctgcttcccacagctttattctatggactgaaaacacattttttaaaaaaatattctaagattggggtatagattcagcaagctgttaggggtccaggagagacagcagggaaggcataggtggccatataggaggtctgagcagagatcaggaggatgagaatggagaccccccaggtggtccaggccgctggtctccatcacaggtgaaagggctacctggtccgccactcagcttcccacccttaacccatctgccgcctgaagtcagttgatctgctagcatttaaccctttaacttcccttctcaatgagagagctgccttgattctttagatatttcttgtggagaaatgtgctttaggagtttgggacttcaagtcttgctttttggtcctcctacatatgcactgtatgcctctgcgcatgcacagacactcagaaaaccctcttcctgtaaatctcctcggggatttgaccacatggtaaaccatagctaattttaaaagcagattgagctattatctggtagcattcataggaaggaataaagaggtggcaagggtaccttaacacccaaaagatcaaggaacagcctcttaaataaaccatggattagagtcatgcaaatgaaaatacaatcctgtgtttgcatgggaatgcttaataatgtagagacatatggttcaccaaaatgacagaatacttttgctgtttcagtaagatacatcatcccctcaacctctcttggataattgtgattctcaaaaagatgaaccatgtctaggaatccctatgaaaataaagataaatcaggaggcatttgccttattagatatttaaagtagtaaaaacgtagtgaccatgggatagaagtagattccaaatatattacacgtattatatggtaatacattgcaaacaggacactgtggtggtttgaatgggaatggccctcatacactcctgtgtttgaacacttggccatagggagtgtggccttgttagaggaagtgtgtcactgtggagacaggcttcaaggtagtatgtatgctcaagctatgcccagtggggcagacagtctcctgctgctgcctgtgcatcaagaagtagaactctcagctccttctccagcaccatgtctgcctgcatgctggcatgcttcttgctatgacagtaatggactaaacctctgaacctgtaagtcagcccccagttaaatgtttttctttataagaattaccatggtcatggtgtctctttacaaaccaagaccaaacaaaacaaaacaaaaacctaagacagatatcttgagggatggggagatggctcagaagttaagagtgctcgttgctcttccaggggatcctggtttggttcccagaacacacttggcagctcataaccatttgtagctccggttagggttagggttagggttagggttagggttagggttagggttagggttagggttagggttagggttagggtctaaccctgatacaggcacatatagatacatatacatatatgcaagaaatacatttatacaaataaaatacacaaatctaaaatgttttctgaagtaaaagtgatatcttgcttcagtggggaaaggaaagggtttttttgttgtttaggaaatggtgatgatatagctaattagccatctggataaaaataaaattggacttttatcccacactatagatacacaaataaattccagatgggttaaaaatgttaagtttaaaaaacaaaacagtaaggaggatggaactatttaattcttgtctgtaagctagagtttaggacgcatttaatagtcaaaacaagaacactgatatctgcttacataaagagatgctgtatcaggctaagagattagacaaacaaaagtcaaaacgaacggtagattatgagaaagtgtgtcagaaatatgacagataaggattaatatctacgtggtgcagagagctcttcaaaattgataagaaaaatacacagcagaaatgtggtcaaaaacttggaatatgcgtttcacagaagaacaaatcaaacacccagtaaaacccatctgtgttttaataccagctccctagagaaactctccttcccatggcaggttgtcttacttagggtttctatttcctgtgaagagacaccatgaccatgacaactcttgtaaggaaaacagttcattggggctggcttacagtttcagaggtttagtccgttatccttatggcaacgagcaggaagagacagtgaaccacgtttggcctggcttgagcttctaagacttcaaagccaacctcctagtaaatcacctcctctgacaaggccacacctcctctgacaaggccacacctcctaatcgtgccacaccctctgagcctatggggccattttcattcaaagtagcacacaggtctacaggtgatttcccataaggctttaggagggataccgacggtacaaaccaaccgtgtgatatgtgtcttcctccctacacagaccacagtgaccattgtgggaagcatctccgcaagacactcggagtgcgtggtgaagaacgcagacacgggcaagctgctctgccaggggagaagccaactgaactggacctgtgcctgcaatatccccagcagacccagctatagtatgtggattcctctgggcaatcattatacagtcaagaacaagagcctctcctgagttcagttactgggggttggggtagttcccttcctgtctctttacctctggttctcacccaagtcttcactacatactacccccatctcctgagtctactccagcccctcactttctgatgtgactggggagagatagggaaggagacattggctaagagagcttagtaatactaatgtaatattactaggtacctataaccataaaggcacctttatgtcttaggattttattgctttgaagagacaccatgaccatgacaactcttagaagaaaaacacttagttggggctgggttaagtttcagaggttcagtccgttgttgtcatggcaggaagcatggcagcatgcaggcagacatgatgctggagaagctgagagttctacatctggatccacaggcagcaggaagagacagtgagccactctaggccaggctagagtttatgagacttcccagcccaaaccagggagacactttctccaacaaagccacacctactccaacaaggctacagctctcaatagtagtgccatccctatgagcctatgggatcattttcattcaaactacaacacctggggtggatctctttttgggtgatatcagtcctgcaagaaggaggggagataagccagagaaaagagagaaaggaatgcaaccagagaccagcttgtgtactagacagaagaagagaaaggggcttaaactggggaactaaaaaaaggctctctatgagtggagcaagcgggataggggcagggaggaccagacagcaggggagctaggggacaatagaagaccatgtgaaacgtgggctccatcctgggacgtctcagctacaagtagcacagtcagattcattagcaggaagagacaattgtggatgatctatccctggagaagataagccccatggggcaggaaccttgaaaagtttgttgctgtgcatagcattgtatctagcccagtatgtcagtggatttttagggagtagatggacaggtgaatggtaatgaatggagaggaaagtaaagaactgaaattcttggttcctaaagagtggctaatagaaaagccatcgaggtggtccagacaagagagactaagagaaggtactcgaggcgaatggatgcaaagtggacatctagggatgtccaggaggctcaaaagaggattcatgagtctgctaagatggaaaagacttgggagagttaaggtgatggtgggcgcctcctagaatgttatcacactggagctgtttgagttgcttgtgagcagcaaagttactattggataatgtatagatggaaatttattgcttatagttccagaggcaggggatcctagatgagggcatcagacaattcagtgtatggtgaaggctttctctctctctctctctctctctctctcactcactctctctctctctctctctctttctgtctctctctgtctctctctctctctgtctctctctgtctctctctctctctgtgtctctctctgtctctctgtctctgtctctgtctctctctctctctctctctctctctctctctctctctctctctctgcttcagagatgatgcccaatcctcccttataaggacaccaatcccatccatgaggtgttaaatcatgagtcctcatgatttaactacttcctgaaggctccacctcatgatattatcaaatcgagtgttgagttcccaaataaaaatgttgatataccaaacagcaagcctagagtgctcagttgagccttcttccctcaagagggaactggatacacaaagccagagtcacaagctaaaaatgtcccttgaaatcactggatctagatactttaaaactgcatcagttttctactttgtcaccactgtactgtctttcaaatgcacttctggtgaaattgggtcattaaagatgcagatcttgctcacgtataaaatatcactctaagtatccaagacagacttagaaagcttggctgaatgcaacaagctcaggtatctattctttgtgctcagctgtctaaagcaatggatgaaacttagtttgtgggttctctatctgtctctctctgcctctctgtctctgtctctctgtctctgtctctctctgtatatgtagcaaatcctcctgctttagcctcctcagtgttagaacatatatatgtgtacacacacacacacacacacacatttctagacatgatccatcatgtctacattcctggcctatttgggctggtcttacctctcctgtcaagtcttgttttccatatactttgaaacagtggagaaaggtcacctctcccatacaccttcctagtctctctgccacacctttggttttccagaagcacctctgtcttgtacctaaattctacatggagttcaacctccgcacaacatggtatccccttgacttctgtttcttcttcaccttggctattttacctcctctagaactgtaagtgcttccagaggagaggctgtgaatattcatttccctgggaaatttccaacatgttgtgcacggttggtgctcagtaaaacctgacttcttgggcaccctccctgggcccttgtcagttctatgggaatgcattttcgctgggagtccctcagtactaaatggccatgtgtgcgttccactaacatgcgtcaagtgtctgtgcagatgctcctgccgagaggtcgtgtcagccctccagacctccttgtctttaaaacaaaagattatcatttcacataagcccactttgcgtgagcagaatgctgggtggaattccagccacacagagaatcaaaggagttccttgtgctggaagagaggcatctccacgcaaggatccttagagtttgtgaacagcgcactaatacaatgccaggaaggaacatagggacgatgtctacaaagtcaggccaacttctcacaatgtcaagactcccatttaacaagcctcatgaattcctacaagtaagaagatattatttcctctgtattagtgctggtccttgcttagacataataggaccacagtgatgttgctgtggaccacggtacccaaaggatggtctgtgtgctcattatgttgggaggggcgttacaatattcaggttctgagaccagcctcaggtctgcagagtcatggtggcttagaatacagctctggtgttgatatttccctaaagcctttctgattctgaccaacagctgggtttgatttcctgctgcctcagatccagcattggggtttaaggaggtaccgaaagcagcatttctctactgctgacttagcataggttttacccctccccccattttattctattggagttttccaaccaacagataaggttttcagaagcaaaccagaacaccttcacttgacagtaggtgactccaaggagatcattgggcctcaccccagggtacggcgttcagggtttcttaggtaaatatttactgagtgtggatggctctgaaggtgcagggtttcttttccggtgctggcattcatattccaggcacttcttgctcggtgacttgttttattctcatgccttggccaattacaagctgaggtagtgatcccagcgagagcatgggatgtaaatgggctgtaaaatggcttttcctggtgattatctgtgggagccttggagctagcatcaggctcagtctgtttggaggcttatgctgtgcactgcggctgcctgacatgaatggcccatggggaaggagccacacactgattgaaatgttggtgaacagctggcacacccgtgccctctgtgtagaaaaggcaagaatatttctttcttccttttgcatctccagctatgcttgactatggcggggacccacgatgaatgccttttcccttccctttcttttcctccagatgtcttagttgtcaatgcgaccttctcctttccgtcttggaacttatcagaaagattcaacttcaccaactgtgcgtcattaaaagagtaagattggctttgacttttaaatgttctcattgcttttaaatttatttgttttgctcctcgatttcctaaagaactcctttgcgaactagaactttccaaagtgccttttggagcatggcctaacgggagctaggagagccacggcggtaataaaccgtgctcactcgttcaagccctaacaagaaaactggagcagcctcagagagcatgcgccaaggtgtccctatcaacagggaaaggtattttccccagacctggaggatccctgaagaaaggatcagtaaggaataccactaactcccataatgcaaatggctctgggagtttggacagagcagtaagacttgcgaatgaggacaagttgaagtctccttcaccaaaaaggcatatccattttgctttctctctgtggtgctagggaactggacttgtgggccttgagcatgctaagcaagtctaccacttagtgaccccagccctgtgtcttccatttatttactattggccccaattcagctatggaccctttgaatttggactacagctccctcttggctcctaaagcagagaaaaggcagaggaaatagtctcttcagaggcccatcctctgcagctgggacagaggacactggtgggctgtattaccagaggtgtgttatccattctgggatgtgattggacatcagcataggagaacagcttccagcctggcccggaagtcactataggaaaaagtgaagtcagatggtgttaagttaccttttccaaagaggtgcattgcaaggccacagagagtcattgctgtctaagaagcagagcgaagttagggaagaaaaatagaactccaacccaggtaaaaggaagagagaatgaagtagaaattaggggtgcaaggacagtttaaagatgtcttgctgtagatcccctgctctagagcccaggtagaaggaaatgacataccccagggtcccaatgctaggtatataccagacctcagagccagatccaccagcctagagagctccttttcagggaactccttggggaacaggcttcctccctgatatgtagtctgttttctgccctcagggaacttctttctgtctgttaggatctccggagcatatatgaactccaggccaagtgtactccctctgtccggtttcctcatcacctcctgctaagttttcttgaggcatcccttggacagctctccagaccagccccgatctttcttctattaataatgtctctccctgatctccaatcattccttatgcatggagggcattctcaggctctccacagtcacccacgcacaaatgcctcctttgattctcaggtccaactcttcctttggttgtaaagcaaacagtggtgccccatcctctctgcctgccaggaaatgctttgtgtctcacaccgtgttgtgggcagcacagctgctccagacagcgcgggctctgctgatccgttgagtggcagccgggagagaaagatctcactttatggaggcttacctgagggtaggcaaatagcaaccaggttcagaatcggattcagtgggttcctgttatcaacagaccagcgggtgaccccagcttcaggtctccatggcaacacctctgtaagtgtgatgacaatccatcaactcacagggcttcccagagaaacacataaagccttgctcgcttctccaacctcaaaggaaatccttcctccctttgtccccctagctagtcaaagactttattattaatagtagtatcattcctgtatgttctcaacctgtagcgccaccgagggaagtttctagaatatgaataattccctcaaagtacagaaattaagttgtttattttccgtgtcaccagatgcccggcgtgtatcagaagcggctgtgcttggtgtaaacgggacaagaaatgcatccaccccttcaccccctgcgaaccatcagactatgagaggaatcaggtaaagtgacatttcgaaatatgacagagatctatcggaagcaagtgcctgcgtgcgcacagccccacccctttctgtgtgtcacactcccatgctgaggggatgttctccaatgcaggagctctgtcaagttgctgtggagaagtcgcccaaggactcaggaggaggaagagtcaaggagagcaagagaaacagaactgacggggctgtgcaggtcaggctcaactttggtgctggtaatggaaagacaaaatccccttttgatggcaataacaactcttactactttgggtttctgttgtaaaattccccatcttataacctcagtccctcctcccccacacacacttttttttttttagttcatttttaaaccaagtttcacataattggctcaatacatcaaaggctttcacattcacataagagaaattaaaactttgtaattgtgaaaaatgatgcggttccagtagaagtggaattgtaaaggtgactttgtggctcactggggaaagtacaacggacagctgagctgacctcagttccaaccagatactctgacttcactaatgaccagcactgtgtgtgtggttagggatctatgcaaaataagcaaactgaccttgcttattttttgatttgatttatggagttgattgaccccatcattaataacatcaagatagaacagctgaagaatatgtgcctccctcccttgtctcaaaagtggcggaggtttttttcccatgaaagtttcctggaaaattctcttgctttgtcttcacagttataattaccacagcctagatatcagtcatatacaaaaagatggtctgagaccatgtgaatatttccgcacaggacacatgtaactctgtttagttccgtactggctccctccagttgctagaagttcattaattgtttacatgtggtaacacacacacacacacacacacacacacacacacacacacacacacacacagagtggacaggttccctccctcattctctttcgactctgtcaaattaagatcagcactggaagaaattccaagggcccagctttctactctctgaccaggctggggctctgatttagccatttgctgctacttaaggtcaagtgtcaacaccaataaggagcacattttcaatcattactgaaaagttgatagtaactttaggtgaattaagtaacaggctgagggcctgtgaacccaaatggattataaagttaattaaagcattagtgaaccttggtgtgccaatatctccggcctttgagtctctgagacttaattaagtggtgggctgctcctctggtctccgtggtttgtaaaaaatgaagatgcagtgacaggagcttggatggagaagtgagaagcttttgtcttttaattaagcttggtggtggtggctttcagttttggtaaactgcagggaccatgagatttaccatcttcactatttttagtgtgcacttccgtaatgtaagtattccttcaccctgcatgtacagccagtcactgcaatacttttcatcgtgccagactgaaactcaatactcatttagtaactcctccccccgccccggccccgccctcatcccaccccggccccgccctcaccctgcccccagactcttgtaaacccctattctattctaacccctattctatcttcaccttgtgtgaggggtttgcctcttgtgacaggcttactttatcattgtgccctccaggctcactgtgttgtggcacggattagactttctttccttttgaaggctgaataatattccagcatatgtatagaacacattttatttatacattcccccaaccacaggctctcagtttgctttcaccatttaggcattaggacaagcccagttagaaacaccggcatacaactgactcttagagccaccctgtttagttcttttgctcaacaccacagagttaagactcctggatcacactgtaattctttttactaagtgccaccatcctgtcttgcacggtactctgtctagccaagggttctactaacagggttcaagggtttctgtctctcgaattctcacggaccttttcctgttttgtttggtttggtctggtcactactgtactcacagatgtgagcagcagcctcactgactttggttgtctgctccatgcgctttctgactccttttcatttgcttgttcactggctgaagtcctctgctaaactccttcccattgacttgactggttaacttgttttcttcctttgggcacaagaagtatattctagggattagccagatacaacatttgaaagtattcctctcctattctgttatctttcaactctgttgaatgtgtgtgtgtgtgtgtgtgtgtgtgtgtgagagagagagagagagagagagagagagagagagggagagagagagagagagagtatgagagagtatgtgtgtatgtctgatgtgtacatgtgtgtttaaatatgtatgtgtgtgtatatatatatatatatctgtatatgtataaatatatatatgtgtgtgtgtgtgtgtgtgtgcatgatcatatgtgtgtgttgcaacatcccaaacccacagcctcacacacaccagacaagtactctacattaagttatatccctgaactagtcatgttctttgatacatagaacttttaatttcagtgaagtccaatttgcctattttttttttctgttgtttcttgtgctttggggggcaggctcaggagatgactactaaaccctaatgttgtgaagcctttcaaacttccattttcctctttgagttttaactcatctgtgcacaccttgcccactggagtccgtttttgtagatagagtaaagtgaggttcagcagcccttcttctgcacatggatttccagcaccattccttgaacactctctccctgggtcagtggttatagcatcctcactgagaaccccatgggcttgcatgcaagtctttattcctgaggttcctccctgtcccagtgctctgagcacccgtcttcacatgagtactataccatctatgtttatactggttttttttttaagtctgtttttggaaccagtatcttccaagttctctcttgtcttcgattgtttcataagaaaacaacacgtaaaattttcactctgttttcctctgatagtaccacctatagctgaagattagccctgctaatgatgtcaaaggtcaaggtataggatgctcattaccacaggccaccccaggctgccattttatagctccatctactgtctcctgcccccaccagccctggagccccacaccactaacatgttctccatttctatagtctggtcgcttctaaaattttatgtaaatagaatcgtctggatgtcccctttgggagattagttttttttattaaatttgtttttatggatatataaaaacagaaattatacatattaatggggtaccatgtgatgcaattggatggaaattcagccgagttcttgtatagcagtctgggcagtgctttataaatatcttaaagagaagggtgacatagtcatagcaccctgacttcttgtaccttctaaactgtgatactgtggtttaaaaagtagcgtcaccaagaaagaaaggtaggtctcaaaagaagccaaggtttgccttcaacacttctctacagattgcccttctatgtttggagaaaggcatgttgctgagactgaaacattaactttacgtacgtgtgactcagagcagaatctcaagtttggttggtagggaatggtatgccacctggcacaggagagatttcctgtgctctctctgtgaaaggccactgtctttcattatcacatgaacatgaaactttctggtttgcacggttggttctcacgtcaagtttgtgtagtagacccaacagttgaggcagagaagccaccaagagcttttcttgaattcatctgcccacatcacctcagcaccaaatgcttcctgtgtgctgggcaccatctgaggctcagagatgctgagctagagtcagtgcttcctacaggaagcgctgaagcatctgctatatgatgtcatgctgaactccatggatactgcacgcaatatacaaatgagttaatcctctctcaggacatcagccctgagactcttttccatgagaacacccatagcagtacaagatttatataatacgtatatgtatgtataagcagaacctgaaagtacaaaaactcaaagccttgctatgcacagagtcttagctcttagtttttcttgtttatttaagcccagtacctgatggttaagcacaatcagtgtggttggttaagtctttgatggatgcattgatggaaaggacttttcagcttaccttagagggacaagaaatacctaggctcaacaagacagaggagtgaatattcttcatgaagcaactgccataaataagtgtagtcatggccggaaaatccaggagacctcagtagttcagtttgtcttggcagcagaggcaggggacaaatgatagcatagaagggtgaacaagctggagcctgtgtgtgctgggatgtatacctttggggatttttgtcttgcttcttcagtggcaatgcaaagcttttcactacatctattttagtatcaatttgatcatctgagaatgtggtgctcaaaagggaggactcctggttcaatcccaggacagtcggcttcacattctcatgatcctaagacttacttgatccaggatactgtggtggtttgaatatgcttggcccatgggaagtggcactaccttgttagagtaggtgtggccttgttgggagaagtgtgtcactgtgtaggcggactttgagggcttctagtgctcaagccccaaccagtgtggaagagacagtctcctcctgcttgacttcagatcaggatgtagaactctcagccccctttccagcaccatgtctgcctggacactgccatacttcccaccatgatgataatgaactgaacctctaaaagtgtaagccagccccctttcattgttgtcctttataaaagttgccttggtcatggtgtctcttcacagcaatggaaaccctaagacagataccctgatccaggaacaccagccctaatttgtcaggagactgaagcaaagaaaagcataggcccagtaaagaagccccagatttcatctggcctagaacgagggcagccatctgctgtaagaccaatcttgatctctgctttcctgaagccatgagacggcaagttctgtcatctgactgggtgaccatctttcctttcattccctaaccgtctttcatctggtgcccttacccaatgagggaagctgtagctgccctcctgcccacagggaaggctgtaatgatatgtggtgaattgtagatgttgtctggttatggttttttgttttgttggttggctggttaggtttttttttgttgttgttgttgttgattttggtttgggggggtatttgttttgtttttgttttattcaagacagtgtctcattatgtagctctggctgtcactgtgtagactaggaactcaatatgtagagtaaagtggcctcagactcagagatccaactgcttctgcctccagagtgctgggactaaagagatgaaccaccatgcttggcctctttggccatactcataattcctcgcaatatgtttatcactatagggaggaaatcaaccatgtcaagctatgtctctgcttccctccatgacttttcaatgtgtgctttaatttctcatatagacagtaccaaatggaccctttcaagaaccttgccttcagaaggaaaattaaatttaacacagacttttgttggtttgtttatgagtagcttctatgggcctagcactgttctgcattgagttcattcacaggatatttgttgagcagcaattgtgtgtgtgttgggcaggcacaatacagacccacatggagtttgcactgtcaaacttagaatgttttggaatgaggaagtgagattcttcgttataaaaagagtcaaacactcataacgggaatagaagccaaaaagaatgtcagcgtggactgagttgactagtggcagctaatctttatcagacccttgccatatcctgaactcagtgtctgttaatctaagcttcacaatgccacattttacaggcatggaagttttacctcaaaaccaaaatgtagataagaaatttgaacccaggtatctggatagagaattttcagttttaactaccaccctaccttaaatgacctaaactgaataagtgttaagccacataatattattgctaaaaccctctctggaagggaggaaactcttaaagataatgcaggcttttctcaggattagactataacagtctgtcccatctgtgcgtcaggcagacgggagcttattctcatgggagacggggagggagaggggcatctcagggtgagggctatgagaaagaatgagccccaggatgggccaggatggccaaaacaagagtgagtcaacaaaaatccagtgttcaaactgagtcttgggagaaggtgtgttagaagcagggttaagaactatgttctctggtctcagcatcctgatccttcaggcctgatctgaggggctacattcaggatgaatggccaagagtaagttagggggtagccttggcagctccaccatgggttgtgtcagcctcatcttagagttagtccccaggtcacagaagcaagtcttaatctctcagaagagagcatggatctctgaaagtttcccacctaagtcctgaggccctgatgacctttggcagttcccagttccctgttccatcccaagttctcttttgctgtactgggactcctatgaagggctatctccttaggggactgagcatcaaatacatcgtgaggtgttcattgaactctcccattattctttgatgggattgtattctgctcttttctttccatatcacattcccttttacactttcccgtctccacggctggtcaccacaccgctcactttgtacatatgattaatatattacatctgtcctcttctcggccattaatgaagatgttaaataattctaagccaaatactcacccccgtggggccccacaggacactttcgtttaattagttgtattacctttcatctctctcatgtcctttgacttcagatgtcctgctgattttgaagccatgtgacttttcatcctgtcctgtttgaactaatttcatgagtgaaaatctgagagatgttttaccaagtgttgacttgggtccagacctacagagagcttcactatgttctgattttttttcccctaacagattaatagagtatagtttgttcttaataaactgagccttcttaatggacctctttccaatagtcttttctctaaaaatgtcatggcaatttgagttatgttggtgtcagacgtcacgcaaggtgagccgtagttaggatttctattgctgcaatacaatactaaagtgactaaaagcaagctgaggaagaaagggcttatttggcctacacttccaggacactgttagtcattgaaggaagtcaggacagtaactcaagcagggcactccactacctggcggcaaaagctgatgcagagggcatgaaggggtgctgcttactggcttgctcctcatggcttgctcaacctgctttcttacagatgccaggaccaccagcccagggattgcatgacccaccatgggctgggtgctcccccatcaatcgctagttaagaaaacgctctacagctggatcttatttaggcagtttctaaattgaggttccctcctgtcaggtaattctagcgtgtgtcaagttgacataagaccagcaagtacaagttgcttgtgccttcagagttgatcctctcagacgttttcaaggagaactgttacaggtggttatacactttccaatatcttataacggcttagttttttgaaaaaaagaaaagaaaagaaaaataaacaggcatcctgcaaactgcctgattaagtactttccaatatgctatcctaatacaaacaaatgagaaacaccccccccctctctctctctctctctctttctctctttaaacaaaatagttaaaatttaccatcacttaaaaataacccctgtctctaaagtggaactcccaggaagtggacagttcagaggttaatgggtagaaggtgttgggccaggatggttacagtcagtgatgtctagatttgatgcaggggaaccttggatatggaaagaaggaagaccctcactataggggtgaggaggcctggctgtatccagcccagttatggtttttagcttgaagggttggctacatcatgtcaggttgtaaattaactttaaattaaagtatcaaataacatctaaagtatggagggcagaaaacattatgggaaagattgttctctggtcctttgtattcattttattttttaaaaagttaacaaatattaaagaaaaaaaaccttttaatgaatcctcatatccatgacgtacagctatgtagctgtgctatcctaaattgtatattttcacagtggggtcatgccactgattgctctttagcctcctaactctgagattaaaaaaaaactctcctggaaaataaaagagctgatgcgaccctctttggaagcaaactgcaggcacctacttccataagaagccaggcctagactcggtcctccatgggcaatgtaaactcctctaaacaataagattgtcaaacgaaatgcttttgaggttgcaaggctcaaggggaaataggaagttaaaaggatatcagcctccgatggtgtttctagagcccttaaaagagcaaaatgcacctacctttgaaacaacaacttttttctttactagttacaaggctctcttatcttgtactatgaacaagaagtagcatgttcaaaagcatgctatcctgttttactatggcagacaactacagtataagtacaagaagcaccgagaaaaagacttggcttcagaggacaaataatggacagtttacaatagcggagaggtatgaccagggagcatcgctcagcgggcagcacacggggatgagcacagaagttacaggccctgaattccgatcccctaaacctagggaaagccaaacacaggaaaagccaagggcaatagcatgtatctgtaactctagcattcctaaggtgagatgggaggcaatgcaacttgtactggctggtcttatgtcaacttggcatatgctagaattatctgatggagagaacctcaatttagtcccatgagtatgtgaagcatcaaacaaggtgtaaggtaaggaccaataccctaggcagttttctgacctctaacatacacatacacacaaacatatatatatacacacacaaacatatatatatacacacacatacacacacacacacacacatatatatatatacacaaacatacacacatatacacacaaacatacacacatatacacacaaacatacacacatatacacacaaacatatacacacaaacatacacacatatacacacaaatatatacatacaaacacacacatatatacacacacaaacatacacacatatacatacacaaacatatacatacagacaaacatacaagcgtgagtgcacaaagtttaaaaaaaatttaaacacacacatatcttgcttctctaataagacagtgtgctctcttgtagagcaggggatacagatttttctctacaacagtggttctaaatcttcctagtgccgtggccctttaatatgttccttatgtggtggtgacactcaaacataaaattatttccattgctaccacataactgtaatttgctgctgtgatgaattgtaatgtaaatagttgtgttttctgagggtcttaagcgacctctgtgaaagggtcctttgtcctccaatggggttgtgacccacaggttcaggacttccatactgcaaagaacctggcagtgtgttttgaggctgtgccagctacacagtctctgttgtaattagctagagataatacacatacttctggataatgacatgtgacatgtgctgttatatgtttgaaattctattctccttttgacatttttttccataggacatccaaaaacagcagacaggatttgaccctgggtctgaagtttcctagcccttgatctgccccccaccacataccatgcctacctttacctagcagctgctggtctagtgatcagtaagtacttgatcacttggctgtcacctacaaagctaaacagcaagtcttcttataacacacacttgacatttgcaagggatttatcttgaagtcgttgctaatccccatcccaagtaccactctaggagataattccaacaccaccccccataaaatgcagtcaagtataacagaataattaaagtgaccctttcaggcacgtagtggttcaataaataaatacagggctaacgttctttttaaggtgattaaaataaagtccaccacaggaatcaattccctgatgcattacatcatcaccacgatgacattaataatggatttatcagaatctgcaaaatcaatccacggtgataatgagtagtggctgctctgccaaatagcccctgggtttgtcaggagagcagggtgagaggttgctcctaccaggcggatggtcagcgtggcagccgaccacattctgtcacccggaccagcaggagatgggcaggcgcgagacatcacagaagctggaccagtgactcagtgtcctcctgatagacgtcatccaacaagcagctgatctctacatttgtgctttggcccagtgtggcatgatgaggcttctctgaactcttaggccactttcaaatgggaagagtgtgactgtggagtctctgtatgctaagacctgccatgctttatgtcagccagagtcttggaatggagagaatctacaaaagaacctccatgatcagaatggacgatggtagcacttggggaagaggtgcacaaggcacctgggttgtttttgtcttgcaaggggggaaacgagagcccgaagggatggctcagtggttaagaataattctcgctcttgcagaggatccagtccaagttcaaatctctgcactaatgtcagatgtgtcacaacagcctgtcattttaattccggacaacaccttcctctggcccctgaagcagctgctcacacatgcatctaaattaaaataaacctttagaagagaagggagatgattcctgcctcctctaggatttgtaggggaaactgattagatcttgcaaatagaggagaagctcagagagatggcctgagtgctagggaagttaggtagcatgtaactccacaggactcagttttgattatagcccagagaaagcgagagactgggtcacagaggttacacgaatgttcacaatgcctaacttttccatacgggagtggctcaacattcttaagacaccctgtcctccgcattgaaacaaacaaacaaaaaatatggactccttcctagagaattaaattcctctgtattgacatttgtattgacggaacaatgagtccgtgtgagcctccgctggggagaccacttcccttcccttccctgggcttgagcatcatgggcctcaggagagggaaaggcagggggctctttctcaactcgaatgacagctcacgcctcagatggaatatccgggctcttcaactgtgttttcaactgtcttgtgagacaaagactaattggtttgaccccatgctgtcacatgttgagagacacgaatcttcagccctcttccttgaattcattgatttcattaaatgctgtctgcttgtgtttgcaaaatgtaatttcctagtgagttcttcgaaccgcaacacatcaacagatttcgtgaaagtgtgtgtgtgtgtgtgtgtgtgtgtgtgtgtgtgtgtgtgtgtgtgtggacacatgtgcacacacgagagagagagagagagagagagagagagagagagagagagagagagagagaaacagtgccattttgtagctttgatctgctgttttaatctcttatttccaataggtcttctacattaaggccattgagccacaaaaaatatcaaccttagggaaaagcaatgtgattgttactggagcaaacttcacccaggcgtcaaatatcaccatgatcctgcgaggaaccagtacctgcgagagggatgtgtaagttgaagcactaacaaccgatctttggtaaagttagaaacctacgctaaagcagtgttagtaggccttggtgctttctgtagtcaaatggcatttaagtattttatacatcaaaattatagtaagtaaattataataagtaaaatctttaatgattcatttgacattcaggtgggagactctggcctgtgttacatcctcagtcaaaaccagtttcaggatgttgccagtgggagccttgattggcttttaaagcagagtcaagtgtatgtagaaaggaactaacttagaattatagacatgaactttggaaacggatggatggagagcgtgctacctgaagttgaaaaggaaaaatggaagtagaaatgttgttcactgtagctttcttctctcgactggcttggttttcatttcaaataattaaattactagggcatataatagtagttaaaaaaaacccacccccaaacaaatatcagatgaagtaccccttaaagataatgatacctgtggttctttttatcctagcaatgaaaaacatatccagtgtttgttcattaatattcttaggtgaatgataacaccttcccaggggggataatactaacattatgtaataataacaccgtgacagataactttagttttctgcttgttgactcttataagtttgggttaatttgaagtttaaaagaaaatgtttcagtctatatgaaccataatactgagctaattctcctcatggaaatgcatttaagacagtctgctgaagcgtgatgttttggttttttaactaccaaaacagacttgtacagtgctgtaatctgccatgcctatttagtgaactttctgttttaattcactggctgcacatcgctgcatcccacctccacttactgcagtaaatctgggatacccatgatctcgatgggggaaagatacccatcagtggctttcctctataccagagtgaatcaacacacattaaagcctgtatctatgcaacctgggttgcttatgtgcaccatttatcctggctaaataccttatagcaaagatctttcattttgtgtggtgaaatctgtgacgttagacacctgtgcgctcaatgaagggcaatcagcttcgctgcaaaataagtcgtttttggagcattaccctgtttctggctctttatgctctcatttccattctgaatgtgtcttgagaagccacagttattaaattaaatgactaagagctctttctgcatggagcattctactaaccacatctgcatggtgaacccaggttcacaagcaggcaacgtaataacgcagttaatcttgtacccgaatccatggtgaaatcccaaaccctgttcatggaaactttgtaagtgaatggctattttttttttaagagaaaaagacaagcctagtagcagaatgatctatatccccacccctcaccttccaaagtgtataagcacatttgtgttttaatgatttgagcatggacttcctagagcttctctttagaagccttaaagatatacatctggggcaggacacatgcaaacagactccagtacctttcaaattcactttcttgtaaggtgtggtgacggtactagggttaacaaccacacacagaatatcccttcagtagtaaaaccagacccttctgtagcctcattaagctgagcaggtggcaaatacaacttgatctaaatgtgtgctttagagactcatagacattagagtcgctgatagtttcagaggggatgtcacagacggctttgatttgattgatgagggccatcaggagtgtataggacagtcccagccaatccctggtctggaagtccctgaggggcaccagccttgtgtcctttgattctaagacgtcagggttcctgaagcaggttcccctctctttgaaggggagaattcccaggtccgtttgggggagggggggggtcatactttcctgtgcttgattaaaactgcttcttcttcttcttaaaaaaaagcttttaattatggaaatgacagctcatatataagaaagatgcatataaataaggctctttataaacttaaaagttttggacattctcccaattttatttcatctttttctattgcttctccccccttcatgcccccctcccccatggaggcggcaggggcagaagacatacactgtggctggagtgtcttccaatcaaatcctggtgccacgttgtttcgtggacccgtcaatgtgtctctgacagagtagtgccaatgttaaccttaatttcttcatttagtgtgatgcccctccttgccctggtccattaggacctctgagggcaaaggaagctgcttcttcattttccccttctaagggggaatgcggatcagagagagagacacacagaagaaagaggaacccagccttagagagccagacccaacaggcggcccttgactagtccgcctctcgaaactgttcttgaccatcttcgagtgcaattcatgggtcgtcaccttgagcaatcaactgtgctaagtgtctgtgtcatgtaagagttcctttcatgacccctttctaggatccgggttagccatgtgctaaatgacacgcatatgaaattctcacttccatcaagccgcaaagaaatgaaagacgtttgcatccagtttgacggtgggacctgctcgtctgcaggggctctgtcctacattgctctgccacattgttccctgatagttcctgccaccacctggatcaggtactgtctggatccacagagggcttctcttcttccggtgaagggtgatgtacataagatcatggcgatggtagttgcacctaaattttcctcttggtgttcctcctaggaattatttctagaaaactgctcctgtctgaccacaaggactgtgagcatagcctgtttttatttcaccatggctactaggaaactcacagctcaaacgttttgttcaaccacaatgactgttcttagcccaggttgctgtggccttctgtgtcacctgccttccccattcgtgatgtaagactccccactcacaggtttcacttgctaacttttagactcagctgctttgaatgctttgggggaaatactggagcctgcgtggagcctctacatttcaaaggtcctgtttgagggttaaaaaactccaaaataaactctttgagatgaatacaatatattaatggggaaaaatgtctctctctagtcaaatttaaattcacatttaggttctggtgtataaccccaacgagattttcttcatctcacacgaagttaacttttcacgtacctttcgagataaaaccacagacaaagcaatgagggaaaataaattggaaggaaaaagagacaaaacatctcctgtactcttacttgagatgaccttgggaagcagctgggtttgctcaactgtgataatagaagtcagaccggacagcttagacagccgaaatgggagttcctccaggttgtacgtctccgaggtgggaggaagtttagccccttgcaaggcagcgtcttgcagagttttcaggcagctgtctctcccctgtccctccatctaagactgtgccctaagctttttcagaatgccatcagtcactccagtgaatgccctgaatttccattacctctttaatgaccttaatctcaggtatggtttagtggtaaaatactgcctagcatttgcctattccccacctccacccccaatctctctatcttcagccttcttctgagtcagggcttccccatgcaaactttgcagcccattggagtggcatagggaagactgagatttcaaaagcaaggctcttacctgcaaccctccgctctgagattaagtatgccctatgtataagtagtaacccggatgtggcactcaccacatagtcatggtatagctgctgacctggttaaaccttacaaaaactctgagaacccaacggtgggttgtccctttggcaggggtgaaccaaggcacggctgcagttcaagcaatatacgtagctccctgagagctgggcccaggatgcgtggtttctaccacaatactctgcttcctcctcatcaaatggctgcctgtcaccatgattgtgctgagcccctgagtctcagtgctcctcatccttgagcaagaaggaggaggtgccaccatctggaatcaggagaagatgtttgggttggttttcttaaaattgaggcagattgtcaagtggccatacagtgtctggggtggacctgccaccccagaacaagtgtctggtgacccatgagaataaccagagctgtaggcagctgtttctttcacactgggtgaccactccgatgttatctggtgacaccttgagactaggtgaaatcactgtttggttttggtgagatttgtgtaccttccccgtacactgaaatcccatatcttaaacaagaatacaaacttctaaggtcactcgccattttagcttgtccacctatcgtgtgttccctgtttccctctaaataaataaactataaataaaatataattggtgggttagagggtttggtcgtggaaattgtgagagcgggtcatcttctcatagattaaactgtaatcaaatgagatttttgtcccgtgaaatgcttccaaggtacagcagatgatctggttatgtgtggcgaaagaccacaagaaagctccgattctattaaagaatttgggcactttcccagaactgaaacggggctgacctgtatttttttatatgtatgtcttagaaaccatgagtctgcagccagtaccatttaaagacttctaaaattatcaacgtcttttaaattgaaattggttccttgtctcccaaatatgaccgagcttaacattaattgtgaatcagttaatagtttagtttgaaatcgtgaacgccggtggctcacccttgcccttcgatcccttgcagcggtgggcaaaacataaccatcatgggcagaaattttgacgtcatcgacaacctcatcatttcacacgagctgaagggaaacgcaaatgtgaacataaatgtaagttatactaaactggggggggggggggctggaggaagggtatgtttcatttctacgacttcggcattataaacttttgctttcatgtgatctatactgtctctgctgtgacggaaagatctcattcttggagttatttggggttgccgcatagaggaaccagaaaagaatttcatgtgttaagacctgccacgttctcctcgtgcgacgcatgtagcacgttgctttaatcagataacacttctgaataggtgtgaaagtcgttgtggatggttggggtgctatgtacagagcctgtgacaagtatgtggtccaacagcaccaagggaggtcggggacctgctgaagtaacattccttctcttgtcattgtctcttggtcctgtggccactgtcttccgcccctcccccactatgcttccccatccccagactgtgggaattgtctggtccccctaagggtttagttctctgagaagagccttgacgttctcacaggaaccttcagggtgaagccatgggtgtctgtgaggaggggctaggtacactgttgcttatataggtgcttcttgaatgttcttccgtttccttcctccttttctctagtgtaaagggaacagccattctgggcctcaacctgaccacttcctgccaaagccagcagtgctgagggtggccaaacactttgtcctacttgcaaccagtaggtgttcacgcctggaaacgagtgtagcgatccatctttcttacggccttgtcctagacacatgcccatccacttctggcacacttcctggccagttcccagcctcacactgagtctgattctggccattttcccgtgatggaagcctgttcagttgtgtagtggcccttggcctgagggacagcctgagccaggagacctggaaacacggtctctttcccagaacatgtcccatttattgagcacctactatatgcaaaaccatttttttttctggctgcaagaacaaagagtaaatgagcttctgcccccacaacacccaaccccaccttcatgaagggagatggcagacctgcactggcattggacactggcagcatcgttggtgacaagtgccgggtcctcccgctccttccatctctcatgagtccaagaagccatgatgtgtttcccagggaaagcatgagtgggtagggctgagactaagctaatggagttcagtggaaaagactagaccagcaagcaggtaaggaagcagggagttgattgcagagcacagaagagggtattcacctattctagacctattctagactaaaacaccactcacgtttgctttgttggaaccttagaggctgggttgggatgggtgatagagatggctgaataccatacagggccacgcaagggagaatcatcccccaatacggctctacatttccgagacagctccccatcacccctggctctgtaggcaatgggggcaggaaggtcttgggggtctttggcaaggagtggcatgagggtcattttatccacggtgcctaaggtagtttggagaggatagttaatgaggatgcttcaggcatggctgggacaggtctaagtgtgactgagacaccaccagatagatgcctgtggagctctctgctggaatgccatctgcagggtaggtctagagggctggtgatggtgaggctagccatttcagcatccctgtggatggagatgggggtggggggtggctgtgtagaagagaaagcaccaaggatgaagaaagcatgtctagaatctgctcgaagcttttcttcaggggtgagggtgggagagtcaaagaaaatagaatgaccagagacggtcaccgagaagctgtctttaaaataagggttgctccccacacaaacaggctcagtcttaggggtaaggagcgagggagaccctgttgctggtttttcttttaggacgttggtgttaaggaagtaggtattgtggtccagtgggttttcaccctatcgcagaagtgctaaggcaggaatttcagaatgtgttcaggataaagaatggtgttcttactccaatgtggccacctagatcctctgtccacccatccttagctccaaggttacagaaaacaaagagagggaatgctgctcccagcttgcttgagtattaatcccttctccctcccagtctctctcccttcctctttatcttacaatgttaaggaccgaacccagggccgtgagcatactagggaagccctctgccactgagccccagccccggcacaccctcccttaagtatctgccaacctgtccttacattgtctgcaaggtttccctgcctgtctcgctgcgcccttgaacatggccgtgtagttatgggttttctttgtaaataaacctgttcacaaattgggtcaggctttctgcctccgtcccgtttgcacacccctcatgtcttaggggacctgttgctgttcttaagcttgtcattttctgctctttactgttgtgcctgaaaagctgcttcctcttgcggtggttagggacttctcagagggaacctctgccgtagcttccccaacttagggactctcttgctaaccttctgcagaggctcttttgacacacagtgactcaaccaggtaccaagttagaagctggcctcagctctcaactcccttcctaaagtttccgggactcagccatgcagacttgaaaggtacctgagagctttgagccaagccttcccctttcccagcctgcttctctttgcagagccaccctgtgctccccatgccatcacccgacaggttctctgaatgccagttgtgtcagtgatgctctgcatagaggatgctcgcatgtgcagaatacttcctgtgtgcccgtcagaccctaagtactttacagatataatctcattcacagtggccaacatttaattgaatgaattttttttttttaatctctgctcatttcatttagggttaattcaatcctatgagatccatagtgttgctggcctggttttatagaggggaagaacaggcgttccgcagaagtttggttgcctgggtcacttagcatttagagctggggtcctccggtacctgataggctctttcctgtctccaggtctctgaatactgcgcagcaactttctgcaggtttctagctcctaatttaaagagctccaaagtacgtacaaacgtggccgtgaagctgagggtccaagacacctacttggactgtggaacgctgcaatacctcgaggaccccagatttacagggtaccgagtggagtcagagatgatacagattggagtaagnnnnnnnnnnnnnnnnnnnnatgtgagtttccatgcatgcccttagttcttcctctccatcttgtttattgcagaaagaaaatgacaatttcaacatttccaaggatgacattgatattactctcttccatggggaaaataaacaatttaattgcagttttgaaaatattactagaaaccaggatctcacaaccatcctttgcaagatcaagagtatcaagaatgcaaacaccatcgctagctcctctaaaaaagtccgcgtaagtcacctgattgccccgcctgctgtctttatctgagtctccgtaattgccttactaacccccaggttggagtggaatctctcacagatctttagattcttctctttaaatagaagaagatcgacaaagctgatactgcaagcccaagcataattccaaccagaatagcaggcagagccatgcctgtgcttgttggaacggcaaagcaccgaacacaccattgtctataatcctaatgagccttgatagcttttgttctagctgtgcatttataccatagcatctgcaagccacatctccagatccactgatgactgagctgtcactctctctctctctctctctctgaacgcagaggtgacatgtctaagcagaaacccaaaacaccagcctcttaggcacaagcagggcgggcagcacaagcctctgtcggcagcccaataatctagggtttgagagtggcgtccgccagcctggctgtctttttctgcagcaggtcaccgtttcctagatgtgcccaaggatcctctgagaagagaaacatacagggtagtgtttactctgtccagcgtaagcggctctgtaaagtctattaaaaaaaataataatactctgcgagtcaggggacgcggctcagtggtagagtgcttgcctgtggtgcccaaggctccaggcttaatctccagcattataagaaaaagaagagcaaccattttctttgtagtaaaaaataattggctaaaagacaagagagaacatttgtactgggaggcagaagtgagagtgtgcttgagtcccagctgtggctctaggtaggacatctggcttcgcccccccccccccccgaccctttcattgtttatcattttggcaagagaggtagtaagtagccatcacgaaatgagcaaccccaggaacctgctcgaggtgctagctgggtgtggcacatccaggcatccttccatttgctgcaaagttcccaagcacccgcactgggattcaaacccggcagagcagaaagcaggcagaaacagctgccttgctggagagtcccagtgagggcatgcagtgaggaataatctttagggaggactatacgaagggggaggagaaagtagactacctagggatgtctttgcacctgatggtggaaaagtttgcctggagaggcgacattggaatgtgggcctccgggaggaggagaaggaagagaaggagccacggacagacagagggaagcacaggctccgagtgtcctgaggcagaaacctgccggctaggtctggcctgaatggggtgggtcagcatggttggagtgaggggccattcccaggaggttagagagttgatggggagggccagagattattagggcctttaaggcattgctagaggcctgtgcttttgattctaggcagctgctagagagagaatgagaacagagatggtgtgagctgccgtcctataggagagagaccgttggcctttacctacccataggccctttcaacatccatgtcagagatgacagaatgaggctgggtgcagactaacttaagatcctgcaaggaaagaaaagctggactaagacctgccatcaccgcaaccatctcgcttggtgcttccatggggctcaggttcatggggcagctcaggttccagggagccgcaggtgccttggcacttgtgtgtgtgaagatgaagaagggacagatgtagcatttttcttccttttcaagtttaattgccaagtttttcttagcccctgacccttcaacctcccccctctccccaaaaggcagaaaacagaaacgaccttcagggatcatctggtggtcagctttgccaaactaattttcacctgagaaagtgacagtcaaaaccttcctgactggaagcatcagtgtaggagaaagcgaagtgtaattgcacctgtagagaacggctaggagccttctgcctcagtgtgagcccaccgctgcactagtaaggttcaggacaaagagggctagtatttaaaacccacaggtctagtccggcacacctagagatcccacccgccccaccacgtctacatctcggggaagctgacagcgcgcatgcgtatggtgcctggcgccactgggtctaacagtaccaatctgtcccatcaggtcaagctgggaaacctggaactctatgtggaacaggaatcagttccttccacgtggtattttctaatcgcgcttccaatcttgctggccattgtcatcgttggtaagtggcccgttccattttgcccgagacgttattccccaaggcttctccgtgggcaggtagaccttcagcttttgggaactctctgtttccattaaatattaatggatgaaaggccaagccagagagttgagaagtgaataacaggtggtctgtggcttctctaatgagtttttacggtgcttcactaacaaagagcgagattgcaagatggtcccttgatgtttgagaagtattgcgcagataccccacgtctttgggattgttttggaaacaagtccattaaggactcccagaacgtggtcatcctatctcatccttggcttctccccaccccctgccctgcttttcctgggaaagtcaggctttgcacgtgtgtctatgttatctattccaacatgccctgcttcctatggacatggaagtaccatactgactaccagtgggcaaatctgacctatttcttggatcctacggtaccgttttggtttggttttgttttaactgaagaagttgacatctaaaaattaggtaactcaccctttaaattcgtgttgaggggggccagagagatgactcaccagtgaagagatgctcttccagaggtcttgagttcagttcccagcagccagatggttccccacatctgcagtgaatctgattttctcctctgctgtacatgaagagagagtgctcgtatatgttaaataaatacatcctgtagtctgtatggacagtgtgaaaggtctaaactctaaggtcccagttttagcttgcattcgttgttagagcttggcaattgctactccttgaagacagggtgttcgccctctgggttttcaccatagtctctccatcccctaaggtctccacccacctctatagctggtgcctgcagctattttatgtccttttcattctttttcttcttcttctttatcaacagcacaccatgtttgttgattaactacaacatggcccctttctgacactgtagggcatggaggcaagggtcggcattgctgtgctgtgtgtcttcgcacccccttcttactctcgtttccaaatctgttttccttgtttcttcgtttgtttttttactgagcattggataagatgtgggtgactgggtctgtccctactttgagagttgacttaaggactagtgctttctttgggcagttgacactcctgggacgggagatatacatttgtgaagaattggctccatgaaatgaattttcctatgttgcctcatcggtgattatttggggtatttttttatgctttccccaagttgtctacctccgtcatatatctacaatttaaaatttgacttgacattttcataaattcctggctgatatgggcttcaagaagattgcttgtataaatgctgagctctgatttgagtatcaactgctgtcagacgtgttcagatctctcagcctcgccacatagtcatgtccactttgtgactcccgagaaacctctggtctcttgttaactttgtaagaagtcattttgtcctttaaggtgatttgtttgaatctgcaggacctctcaaaaccatcccgttgtgactcattctagggaggcatgtgtcacggcagctatggtaaatgtgacctagtccttcactcatgtccttagtgtaaatgctagatgcacctagcctgagcctgccaacaacagagccaggaaaccaaccctgctgtgtggatgctgcagctccctttacattctgagtcagggtagcttcctggggagccactgccccaaatgaaaaaaaaggggttctctggttgggtgagtttgaaaatcagctcttggaaatgctcagtcccggttattgtaagtacagctgagatggtgaaaaagtctagggatgacttctgtgtaattgtgttgaacagtgtttgttttctctctgtgtctatgtctctgtctgtctgtctgtctgtctgtctgtgtctctctctctctctctgtgtgtgtgtgtgtggtgacatacataggggtgcccaaataccataggactcgtataacagaggaaaaatttgtctgtgtgtgtgttgtgcccgaataccactgcagacatggaactggcagaggataacttcatgttgctgctcttcaccttccaccttgtttgagacagtgtttcttgtctgtaccctgcatacactggggtagctagccttaggattcctggggcatctcttgtctccgcctcccatcttgctgtgggtgtgtctggctttacgtgggtccctcagatcctcctatttggatggcaaacacttttcccccaaccccttttgtgtagtatctgttaaaagttgagatccttctgggatcatatgagagctggcaatcgtttgttcctcgggtcgatgtgattccttgatttactgcctgtaatctcttctacatcacagctcttatggataaggcaggcaggcaggcacagagatgctaagggatttgctcagggtcacacaggtagtaaatgaaacgacagagcggagatataaacccaagctccaggattcgttgcactgactactcaaacagcatggttcagagcaaggtgatgtggacacagaggccaccagctatgggggctctccatgacttgcctgttacatcaccccttcttaaacggtgcaagttaggctcctgctgcgaggagggatctgcagcaaggacacatctgtgttttccttcggtatttgcaacgctgtttcgtttctccagatatgattagagatgtggggaaaagaatgaaccatccacaaatccagtggctggcttcagggaaaaacttggcctgcttccttactttccagccagctgggacctttggttccaagtgaaggttatttgattgtgttttcactttaagatgagtggaattttttccccctgttacatttaacaccttcctctttagaatgacctttaatgggggagctggagagatggctcagcagttaagagcactgactgctcttctgaaggtcctgagttcaaatcccagcaaccacatggtggctcacaaccatctgtaatgagatctgactccctcttctggtgcatttgaagacagctacagtgtacttatgtataataataactaaatctttttttaaaaaaatgacctttatggaaatggccctttaataagaatccagcttttgtttttttttcattttgttttttgtggcattgaggttggaacccaatctcaatggaacatgctaggtcagtgctctgacaccacacagaccccccccccccataaagtttttacatgctcttttctatgcataattctccctctatctctcctccctgtttctctccccccacccccacccccacccccattttcatttctgtgttactgcaccaacctgacccagagtctctgtcccctcagtggctgtggtggtgacgaggtacaaatccaaggagctcagtcgaaagcagagccaacagctggagctgctggagagcgaactccggaaggagatccgcgacggtaggctctgagactccgcgtgcgcgtagcaaaacaagccctgctcacttttattttaatttttgcccttatgtggaaactgccacataatgagaactgattgtgtagtagaagacaagctgagcagcagggcctgggcctgggcctggctttgtgttctatttcggctcttctctgcagccaaccaagtaattatctattgtttcttctttaatgaaaaccaaggtcacactctgtgttagacaaaacagcagaggatcttatccattgtttgcagagttaaaatattgctcttgggattctgtgttgcaggctttgccgagctccagatggataagttggatgtggttgatagctttggaacagtacccttccttgactacaaacatttcgctctgagaactttcttccctgaggtaaaagaacactgatcatcatcctcaggctgagccttgaataataatgcgacatcttgccttaagtccgggccgagcagggaagaggataattattaattgcattgattagggtagagggcagcaacaggctactggcaattactctttccctggtaaggagtacaagtttagagtgatgggttttgccatatatatatatatatatatattttactaccagcttcaaactgactccgtagctgggaagtgagctaattcattttaaaatcaataaattgtgggctcgccaatttgttgtgtttatctgcctgacttgcactgctgctcctagattattcgctattatttctccattggaaacgaaaggcaggatcagccaaatgggggagaaattggacacgcagggaatctgagttgatggcaggcagttttagccacgtgaagggtttatggtctcttctttgacagtttttctgttagtagatcactttgcttgttcaatagatataggtgtctggaatgagatgtgagtggttctagcgcttcaagtgtacagagagccctttgggttggggtgggtctcaattctgttctgacacccccatttcctcacacattcttcagttaccttcccccccacccccaccccaagcctttgacaagaacactcacccattctgtctcaccacgctatacctcagctctgccatattgctctgctggtctcagagagatgccctctgaattagagctcattagtccctcccatattcagatctgggccagtcagcaaagttagaaatctcttcaaaccttgactgtttttggccagaagcctaagaacataggcacatgtggttggcaatttctagtgtctctacaagtcttgcaatggatatatatatatatatatacatgtatatatatattaatcatatatataaatatatatttatcatatacacacacacatataatacctacacacatgcacacacatagcactgtcgggacagctagacattgccacaagatacctgccatatatggggatccaagccttggtgttataaatcaagaaggctacaaataagaccagtattcttacttatcctccaagaataccaggcaccaagacctgctgcctgctgcctcatccatttgccgtacttgggggaaggagggaaattcaagtccctgagtcacggtaatactcaggacctctgagaagcttgcatctcgagccccagtttccccgttctctgagattccccattaagaatttaaaagcaataaaggagatttccagcatccagatgagtactgtgtgggcttttacagttaatgattgcccttgaatgctgaatagcataatctgcggcctgaaaaggaaattctcctatcttctaaagtcagcagtcaagggcagggcggactgatgagtgtcaaggaacaccattgcgagccgagtgcctcaagatgaaaggaagcccccagaatagcgtggcattatcttgggagaagagaatagtcgcaaggagcccaaccgatttaactcagggttcagtgtggtgctgaatggcaaacagagagtcctaaagccaggagtcattaagacagaggacccaagtggaaaccaacagggatctttcagaactctttgaaggagatctaagtcaaaactgagtttatactaataagaagtggggtgaagcccaagaccaggctgcttgctatggttgaccagagccagatccttgggcctggagcttggatgtctgagaggccatgatggatgatcagttcttccaagacagcaaaggaagaggtggccagggtgtggcggctccagctttgctcacctgcctgctggttttgttttaaagctttctttttcattagagcagtggttctcggccttcctcgtactgtggcccttttaatacagttcttcatgttgtgctgacccccaaccacaaaattatgtttgttgctatgcctgtaaccaattttgctactgtgatgaaccttgatgaaatacttgatatgcaggatatctgatgtgcaacccccgtgaaaggattgttcgacccccatgaaggggccttgacccacagcatgcgaatcgctgcatggtgtatatgtgttattgttgtctgagatagggccccagatggcacaggctgacctcaagtttccaatgtcataaagaagaaccctgaacttctggtctcctatagatagactgatttctgttttcctgaaaatagaaaacacaggataagcagaatatctaatctcttggaggaaggaaatttgaatgaggaggagaagttttgagccagggagcaagggtatcatcacttcccagcagaaggtcaagaatgaattgtggggtcttaagagggctcaggggtaaaggtgcttgccacagtaagagttcaatctccaggacccaaaagttgtcctcacacacacacacaccacactgagacatggcccttccctcccctgtaaataaatgtaatcacacacacacacacacacacacacaaaactgtttaaactggacatttatatgaagttaaggagtagaccaaaataatttgagatcttctgctttggctaacaaatttgaaaccgtgaaatgaggttctctgcaggaaaaatttactttattaagacacaagctttatccagagtttaaagtatgaggggggggggagaggagagaggagagagaaatctgtttgatgttatgattttacttagttaattcaaactattacccagtatggttttatattataatctttgggcatagtccatgttagtaatttcagactttgggagacagagaccagagaattgctgggaatttggggccagcttgggatataaagtgaggtcctgtctcaaaaacacccaaaataagtaaatagaataaaatgcaattcttaatttcggtaagattaatgagacattaaaaaaaaaccctcaaaatgaaaagtttatatttaggatccacatagcatagtatatcaagacgtattttttcgagtagggataaaaccctcagtcatagtggacacagagcactgtgtgctcagggctcccgcatttcatttttacaagaagcctgtgaggtgggaaccattgcctccctccatttcacagatgaaggaagtcggacacagaggttaaataacccatgcatgctcgtgtggccagtacatggtaagccagagctgggcccctggtagtttggctctaaattccatgcttatgcatcacatgttctgccattgcttgaggatgtaacatagtaggacagtagatgctacctggctataccacatctaagcatggcggactgtgtgagcctcatgcttagagggtagcgctgtgtgagcctcacccttggaggtcagcactgtgtgagcctcacacccttggaggtcagtttcatgatgagaggtctgacgtttctgtaatcttccaccaccattttgttttgttttgtttttaacttttgagtcagttctcttttaaaaacccaacataatctaccaaaaagccagtctttgccaacgacaattctcagaggcttccagaggccacgggtgttttttgagagcatggcaattatttattatgtcttagaggtgacacagcaagcgtagaccaagggctcttcagattagcaaatagcacccctgctttattagaatggacttgggtattgtaacaaaaatgcactgttcatttccttttggatgttatgaataataaaagtgtctccttcctctcagtcaggtggcttcacgcacatcttcactgaagatatgcacgtaagtctctccgtcttcactttgtgctcagtgactgtctgtcagcttatcatccttactgtcaccaccattgttaatactttgaatttttattgtgggcatatttggatattaagtaacctgttgtcttgggagacccattgtggctctgctttctaagtttccacttacgtatggtcctgagctatattatcatactgttacatcattgttgtttactcttcacctcctccagaacagagacgccaatgacaagaacgagagcctcacagccttggatgccctcatatgtaataaaagcttcctggttaccgtcatccataccctggagaagcagaagaacttctcagtaaaggacaggtacctgttagttcctttgtattttgataagcacttagacagagacgtgaaaacctaagcacccaccgggtatgatggcacacgcctttaatggtagcatgctggaggccaaacaagtagagctttgtgagtttttgagaccggccaggtctatgtaacaaattataggccagctagggacaagcaacaaccccaagctacttattttagctttgtttttcccccttatttatttatttatttattcattcattcattcattcattcattcacttcacatcctgatcatagcctgccccctcctaatcccctcctcgtacagtccttccctatcttcctctccttctcctctgagaagagggagggccctccctggatacctctggcacaccaagtcactgcagcactaggcacatcctctctcactgaggtcagacaaggtggacccgttagaggatcaggatccacaggcaggcaacagagtcagggacagcccctgctacagtcattgggggacctgtatgaagtccaagctgcacatgtgcaatggtagtagtgtcggggactggctgttgttctgcttgcagacagagcccagcatggctgtcctctgagaggctccatccagtagctaaccaaaacagatgcagagacatatgtacagggggcctaggtccaccccgtgtatgctctttggttggtaattccatctctgggaactcctaagggcccaggttagtggctctgttggtattctctgggtattcctatcccctccaggtcccccaatccttacccaggctcttccacaagatttcctgagcctcacttgatgtttggctgtgggtctctgcatctgttttggttagctactggatggagcctctcagaggacagccatgctgggctcttgtctgcaagctgaacaagaaccaatccctgacactggtaccattgctttagtttttgaagggctgggtatcgaactcagggcctcagggatgctgagcaggtgcttcgcactgagctacagacccagctctcaagctccttgctcttaaacctctccctgcgcctcagcaggccctgtcccagcggagttgacagggggtttatacagccatgctttgtgcaactcggatcacaccaacagaacccagttctgtcttgaaggcacacatacatacacatatcacccagtaaaacctgacaaaaaccccaacaccaaaaaagaaaattcttaaccaaaaaagcagaagtgttatttttaattttgaattttaaagaaataccctaaattttttggaaaagaaactcacttcttgttgggaaaaaaaatagaaaatgacttgtttggtttgtttgtttgttatttcatgtacccagcaggctggcctaaaactccctttgtagctgacatgaccttgagttcccgattctcttgcctctccctccatactgctgagatgacaactgtttgccaccacagcccatatatgcccttctagggatcaaaaccagcgccccatggactaggcaagcagtttaccaactgagctatgtgggtgcttacgcctggtgggtaatcttatgccataagaactgaacggatcggaacctaaacaacacacaaaaaaatggctcctcaggagacaattcccccattgccagcaagatttcacggaaatcagacaagtcctcctgagtccagggctaacggctcaccaggctctatttttaaacaggtgtctcttcgcctccttcctaaccattgctctgcaaaccaaactggtctacctgaccagcatcctggaggtgctgaccagggacctgatggagcagtgcagtaatatgcaaccaaagctgatgctgaggcgcacggagtctgtggtggagaagctcctgacgaactggatgtctgtctgtctctccggtttcctccgggtaagtgtcacagggctctgcagtgtcagaggtaagacaataggcaattatttttagcccacactggtgtctttgtggagctaagtccagaatgctctgtgcagtcagcgtttaattgaacttgatcgtgggtcttccagattgaatggaaaataacaattgtgcgggtcttgtttgtttattttctttgtttgttgctgctgttagtagtccctagggtacatataattcacgtagggctctcttgggtaagattcttatatgcgagctcatcttcttatcttagttaacacccttgattctgctagcctatgtaggaaaacgtcccgagacctgagactgtttaaaacgctgatgagcacaaactgttcttgagtcctttaaaacatgttggaaatactcattactcactggcacactggcagctaatgacggtcccttcttcccaggtgttcagcagtaaagcaaatccccaaagagccttctgtcctccgagttcactttcttgaagtgactatggcatatggttgaatttcattgaaccttcaaatctttcagagtccaaactttctatgagcattggagcccagggctgggtctggagttaagacggctccatcgcttcttggcatgttacctgtggagttaacaaaagatgaatatcattgggctgttttgaagcccagatgagcaggagtacaccatttgctcggcactgagtaagaaccccataaatattggccattattataaaatattaaaatgaaaatcagggtgtttctgttgaacatggtctttgttcatcgctctgaggccctgggatggagggaggttcttatccatctttaacttcaccagccgtccagattccagcaaaacggcataattgtgtatttgcagcttgcttcaaaatctaattaaaccctgaataagatacactgctatgccacaggttttaacagggctgcttaagctgagatccacaagcagcactttaaattagactgtgcctagtttaatgtttaatgcaatcttaagagtagatacgcaacatttaaaaaaaatttttttaactgacttttcccactcccaaggcaatggccgtttattaagattaatgaaatctgcctccttttctgtttacttggtatatatcatctgctctggggatgtgtcaagtggttatttctggagagagctgcctttgggcctccctgaggctgggtgggtggccactgctgaacacaggtgctagaccctctcccaggttcccaggtcttaatcctcagctgaccctaagccaaaagccctagaatggcatccaccagtctcttctctaaaaactctgtggctaatgtgtacaatgctcagaggaaacagaaagcaaacacgcaccctgaggttttgtttaaaaccagtaagcttgcttgctatctgcgtccattccccagcgccccaacccacccagctgcctgagtcccccgggttagcgtgttcactgtggacactgtatcattttgttgcttgtgtgtttctggcttggtgtccattcactggtaagtctactggtttgaaattcactcccagctcttccctaccaggaactcgcaggagctgcttttaggcatgaaaggggagaagtgttcagaaaaatctgggctccaagcccaagcggcccccttgagcaaagcattctgggtcaagatttcttctctgtgctgattcaagagtgtgtggaacactcggtggtgaggggggagagcggcacggtgcccaagaggaagtggcagccagccagtcctgggcgggactttcactttcagtggaagaatccctccagttatcaaggggcttggggggcctcctcttgccctgctcattgatgctaagcaggtagcaaccttcaggtgagctcccttcccagactccaaggcctggtagggacagatatgacagttgacatctattaagcactgctgttggctatacatcagacatcaggccaagagcttggattatcttttctcatttaacccttaatggtctgcagaggtaagtacatttatggctgttttgcctatgggggctcaagacagacagaatagatgtgattctgtaggtccgagggtagcgaggatggtgccagcctctgaatgagctgatagtcagctctggtctgtcatctaaagagagaagacatgtcccccaacagatgagacatacaattccttgtgttagttgacgacaaagaaatcttgtggcctggtggtttcctaggctagtcagtgtctctagaaaggtttttcaacctgcctctgctaccgaaatctaggttgagtaggtatctatgtggcacagggtaggggacaggcacctaagttcttagggagatccttaaaagatgctggaggtgactcgatagggctagaactgagggcccgaggggcagtgtgaagccatatgtcaccagctccatttggggaatgctggaaaatcctaactagagagcccttgagccagtggctgttcctctgcccagccctgggggtcctggctggcctctgcgtcaaccaatgtggccaacccagtccccacacaagggcccttggtgtgtctctgccatgtgtaagaaaggcagaagtgaggttcttaggtttgtggtcaggccctttcccaagggggtggacggaaagcagatctcggtgagataatgaaccatgaaataaaggaagtttcgtatgagaacgaaatgtcaggtactggtcccccttgccccaccttggaaacttctgaacatccccctctctgtcccgcatcaggaagaggctactcgctactgtcccgcatcaggaagaggctactcgctacttggggagttgtcagcagaggggagagaagcaaagagaggcagggaggaagtggaccaggagaggtagagggtggcaggagaccaagggagggacctgtgcttggaggaagtacaaaggcagagacaggggtgagcggagaggttaggggaggccccaaagggttgtcggtaaccctcctgttcacaggaaatcagacagagagccagagggatgctcctttcgaagctgaattagttagctctgcagatgaacttggtaacatgggggctccaattggagccatgtaactactgtttcatctttactaaggcactctggcttgggaggagccctcccctttcccccaccaggcctagtgtccatggatcctggaaacctcattgtttagggggaaccgaaactgccccagggctgcatgcctcagccgatggcaggaagcagaacacagcctatacctgaactacccaatgtccctttgaacatagtggcttcaaatctgggccatcaaaaccccctcccccaattcagtgggacgtgttcacaggagagggctggagacagggaccctgggaccagccttagaggttcagggaagggaatactgcccatctgacctgtgaaccgtgcaagaggtgtctgaatgataagggccaagggctggcacatgggcaggacaacagctgaagtggaggccacctccatcgctaaaagcagttgaacactgacaggccaccctccacagcaaatgtttaaaacattcttgcatgagtccctgttgccaagactaagtgtgaagcacttttttttttcttaatgtcgcttatttttggtttgcaattaaacgggcacgtaaacaaggttataactctacctccgtgaactgctcttaggcaccagcctactgatgagcacaagcctgccagacaggaacttaaacatgaaattaaggggggcctctactggatacctcccatagtgttgggggtggggtggggctcgtgcatgtgcatagtgtgcaagaaggagtttcctgggtgatgtgctgcgcgtttccacgggctttgcatgttgattatgagtgaatactgctgcctgtcactcgtggtactaccgtgggcttcagagctaactgttgcttttgcaactttttccaaggagactgttggagagccattctatttgctggtgacgaccctgaaccagaaaataaacaagggtcccgtggacgtgatcacctgcaaagcgctgtacaccctgaacgaagactggctactctggcaggtccccgaattcaacactgtggtaagcttgcccaaagcgctccatccagacccagagggtgggggtaggtgggatggggggagggtgggtcctcctgactgtgggaggccccggggcatccacataattgaaagcagtagttgataaaatattaacacgtgttcgcataatagattttaattccttgggttggggagggaagcgccgtgacgatgcctgggatactcgtcaatttccaaaggttttaatatcgggattgcttatagctttgaacatcgtcaaaggaaatgcaaactgctccctattcggcacttataattgcaatcagaatttctcaaatggctctgcttggggaagacaatgtgtgaagagatatttcaacccaaattgaggccgtcttattttagaccgataacacaagacaaacttctctgtgttccccatgcaacacgacgccttcctttattatttccatggattggttacaaatgtttgctgtcacgcacttaatgtactgtgatctcatagatatttttagaggaatgctgtagatcgctccagcagggtgacggggctaggctgcctgagagtttcaaatactgagagcttccttttaacccattctggcgccagccgccctcaatcacccccagagaaggagacagtacttcggggcctttcaggagttttgtggcagaagccccacatggaacatgtcttccatacggctcaggagctttcgaagcttttccatcatcgtcaacttgaggaaaggctctgtagctttggtttgacttttagctctatgaagactctagacttctttaccatcttattagtggacatggaagaagtagattccagtgggattcaggaattgctcactggagagctcaggctcctgtggctttgctctgggtggtgagtcctgtggtatcattctagaagaattcactccctaattgaagaaggcaccactgtgctatggaccgtattatggttatgtcatggctgtgggtgaggaggagccaggagatcagctgtttccagtttctttcatctgtgtgtagcatccccatggctgtgtgctcagcagagcatggttcctgtggataactgtcagcacctgtggggtagggcagtgttctcaggctttagcatggtggcactgtggcccggacagtgttaaacacccattgttaggtgaccctagatgcaagtctggggtatgacttagggtttgcatttctttcaatttactctttacaacatttatttatttttatttgatgtatataagtatctgcctgtatgtatgagttgccatgcgggtgctgagaactgaacttaggtcctctacaagagaagccagtgctcttaaccactgagccatttctccagcccagatttatttatttttaattacttgtatgtgtgtgtgtgtgtatgcacacgaatgtaagtatatatttgagaacagaggtatcatattactccaaagatggttgtatgtaacccaacaagagtgctaggaactgaatttgggtcctcttcgagaacaatgcatgcccttaaccactgagccctccagccttaggatgtgcatggttaatattctcctcaggcactacttgagaactgttggcatgggggttaggaacctgggttctggagccaggcaggtttgaaccttgcctctcccactggctagctgtgtgacactgctcgagtctcttcacttgctatgccttctcagtctccctgacgataaagatgataatcatgacggcccatctcttggggatgtgataaagattaaaagagtatccagcacacaggcacacgcatgcatctgtgcatgcacattgtcttagttagggttttactgctgtgaacagacaccatgaccaaggcaagtcttataaaaaaaacaacaacatttaattggggctggcttacaggttcagaggttcagtccattatcatcaaggtaggatcatggcagcatccaggcaggcatggtgtaggcagagctgagagttctatgtcttcatccaaaggctgctagtggaagactgacttccaggcaactaggatgagagtcttaagcccacacccacagtgacacacctattccaaccaggccacacctccagatagtgccactccctggtccgaaaatatacaaaccatcacacgcatatacacacagacatgcatgcccacatacagaggaacatagtcacgtggggatcctcagtttcttctctactgtctcctttctctccttatggtctttcctgctgctcatccaccaagcccaaagcagtacgtggcccccagcagtgtcagcaccgtgcctctggctttctagaactgtgaagtcagtcagtcccttccctatacaaatcacccagcttcgggtgaggccagtgtttgggtctaacaagagaaggcagccctcacaggggtcttagggataaaggttcctaagtaaacgtaggtttggggaatccagcaagatttcttttcatgaaacacattgcatcagaccaggaagagaagaaaggaggtgggctggggggaaggggagggagaagtcagctgcccgaaacaacttttgaggttacggcgttccagcgctttctgtctgaggactttctctccctttcatttggaagcgttatttatttcacagtcaattaggaccatgtgtttctgatttgttaggactcaactcatcgtcaaaatgttacttgatgttgaagaaattcgtgtcgactcttgaattttttcccctgttatagcctctgggggaaatgcaatggaaaattaaatctctgcactgttctcctctgattcatctgcggtggatagagtggaggctggcagagaggtgggccctagctcctaaggcctttgcctttaagaatgattttttttttaaactgtcttttgttggacctgctccaacctctctttcatggtggctgattaaactagaagctagagagaaggcacatgatccagtcagtctaagcttgtgtgaccaaaaaaaaaaaaaatgttaccgagggtcaatatgaaaaatttaagcattttcatttcctttcatataagttctcccaacctgaaccaccctgtttctaagtttcccccttcttcccttcctcccccctcccttttctccacttcccttccccccaccctcccaggctacactcctggtggtttgcaaagccttgctacatttgcctgaggtggtttatgtcattgaagactaaggtgttgtgaacatactggagagtgtgtgtgtgtccctgttctaacaagggacattagaaagctctacaagagtcacaggagcaacttgaaatagaagaatgtggtgccatggcgggccccattggagaaaaagcccgttgggatgcatgctcagaaacagcgcctcacacaacaaactctgagttaggtttcacacctcctaggttagaatgttttctctctgaggtgtagggtgttttctagaacatagagatgcactgccagtttcttgtatttaaaacccttatactaccaaatcgctctggaaagtcagatgtccttcagcccatcttgagaggataatgcctgagttgccttcacaaagcccttcataaccaccctggctccagtaccaggtgccccagaccggcatctggcaagtcgaatggtgccaatctctattcactctctgatgcttaaggggagattgtgtcaatcttcatacgacaccctagacttcctttaatgtgtgaggagatggccctaaagggaaaatgcttgctatacaggcacgatgacctgagttcaaatctccagtacccatgttgaaattagtcatggtggcacacctgtaatcccggtgctagggatggaaactttcctctagccccgggttcagtaaaggacactatttccaaaaataaggtggacacttgatccagaaagacttcatgctggcaggatagctaggctggtaaaggtgcttgctgccaacctgagttcagtccttgggagccacatggtagaaggacagggcctgtccctgaaaatcagcctctgctctcctcatgcacacttaaattaatacataaatgtaatttaagttcagagtcacctacagctgcgtggcaagttccaggctagtctagattacatgagatcctgattgaaagaaaaacagaagagaagactgaccactaacctctgaccttcatacacaccataccctcacatgtgtgacacccatgcatacaccattcaagagttcagagttgacagtcaaaagcgggagcaaaacctattgatcctctgttttctccacagcaaaactgagagcttgctaaatagtgtttctggggagtgcctggccctggcccaccctcctgtatgtcaggaacatgtttgcagagcagagggcctgcatcttggaggatttcagttccaggaaagtataccacatgggagaagggacatttgcctcagtttcaagaggagatgagaaaaaccaataactcgtaacaggcgtgctgaattagcaggagaagtttgacttgtaatcaaagttaagcgagaaatggttttttgaactcttaaacccaggaaatgagcttgccaatctgctgcatcggagagatagcatcttggcaccctgggaaacagagttccgacaaacacattattacactcgttctcatatctgtacgaaagtctttaagattattagaaattcttgacaaagcccagggacatgcctgcagaaatgctaatgcgtctgttgtgattcatggaaggtttatgccggtcgctaccaagtcaccctgctccccggtggctgccgtttggggacaggcatgtttagggcaacattctatctctaacacaacactggctagccctagcaggaatttctgtgtgttctccttacctctctcaaacccctttggttccatttagcttgtccttgcagaagatccattatccccgtaattaaacaacccactgtcccgattaagccgttctctgttacttcaattacatcccattgttcattaagtcctgatgtttgcacttcagcaatcttgtttttaatactcctagcatttgtggagaaacagtgaagttaattaacaattcttaagctcttttttttttctttctaccatagtgcaaatcatttccattatgacttgagataatactgaaaccattactagcttcatagttagcttcctgatcaaagagtgaaaccatttttcataatcgtgttaggtaagtcattccctggtcgatggcaagctgtggaaaatgaaaaattaactttaaatgagcgctttcagtgccgttcctcttcgtggtctttctcttcacgcctatcgtcttggaattagagaaataatttagttatctcagtacaaaagtatttaattttcatctctgtggttcaaattaattattctttcattatttataccttttacaaatcagttgctttgactacagccatagcactctgaacacgttccatttcatctgctctcggaaggtaaacagaggcaggcccccgtgactatttgaatgggagagtggtattgcaaaggtttgtctttttgccgttgtcattttccatttggtgatatatatagcaggaatcatcagtcaacagcctggggacaaatgagacccctggactgtttttatgaataaagctttattggaacactactccgtgtattcatttctgtattatgtctggctggctctttactaacaatggcagaaagtgttaacttgtcgcaccaaagaccatataaacctcaaagccttaaatattttctgcctgatcctcaatagataatttgtcagctcttaaactgacacttgaaggcgggggtgggggaggaatctagaatcttctctctaatctgaaagtgcttggcaaagtgttctcactgttcacaaatctttgctagctctgttctctccattctaggacgtgcaaacatgctaagtatagagaaactggtcacagaaacaaagtggggccaatgcctttctcaccttgtcttgttcagaggacaaaggctttcttccacacttctctgcccactgtaattctgtgagaggagcagactccctagctgggagctgttgtctatccttgatgcgacaggagagggggctggacatggtaggaggcgggtgagcatgggttagggagacagttgaaggcagggaaggcttgtgcagggctgaggggacaactgttgaaaccgcttggaccgctggctatactgagcaagctgcagcctttctgagtttggtacatgaaagagactttcctcttgactttcatttggccctgaaatgaaattagaaatatattttatagcttttattgaatgagaacaattattgctcaaagaccatttatgacaaagttgctggtttgtaaaaaaaaaaaaaaattcctttataggaattatagggtatgtcagcaaggatgtggctgcatccagcccttgttagccacagatatgtcagagaagctaagcaggtgacattatagacctcccctgggacagggttctccccatattcagtttatcccaagaagcctcagttttttgtttcctctatacctcaagctggagagaaccactagccaagtaagaatgtgtagttattcacccatgtgctgtggggctagggtcaaagacatgggatttaggctctgagagtcctaggtatgaaattggtcttggtccattactgtgtgactttgggcaggtcaccacccatcagcctatttattcatctatgaatagttggtgataaaagcctaaccttgtaggtttttgtaggtaacctttctgacttgtgctaaagtcagaaaattatgtgtgtaacacacctactgcctttcctggcacagaggaagtggtcattctttgtgacagtgtttttcttatcacctttaaggtacactaaagggaggtctctcctgtggtccttctagttgtttttttattgatgataggtgaggtaggggaaccaggttagctagctctgtcatcatgataaacacatctgaaattcccatgtgttgtgttagctctgtaccaggttacacatgcttcctgtgtttgggcacggacaaccaaatggcagagaataccctgataggcagggcaggagttgacagtggtaaacctgaacaactgtctaaaagccgctgccttggggtatgctgggaaaaaaacagccattttcatccagtcctctcctatgcactgtgagtctccagatggccttgcctgcctgatggcttccttctgtatatagctattaggaagcagtacagctgtgtagaacagaggtccagatgcccaagtccaagcagcagaaagatggatttctccccagtgtgaagggccggaatgggcagccctgctctgggatgcctgcaggtaacttcttggaatgagctgtctgcttcctcagcctctttccaattgccacagcaggacctcagcaggactacacaagaaaggacagatggtcagcagctgtcttgcaagaacctttcccaggggttgccacataacacatccatttaaagtcattggccagaatgcggtcacgtggccacacccagcagcggggacagggcagtgcccagaggctccggaagctatacacagtaatgctgatcaacgtgtgcttccagaagatgcacagagcacagtttggtactaagccagagtcagaaggtcaagccccctctagtacctggtgtgtgcccacccatcgtctactgatggagaactccgcaaggagaacaccattcctagcctcctggcatttcagtgggagtctggacatagtcaagtgtgacccttccagaagctgtaatctgggacaagcttccagacctcggtgtatctccccggctccatctgttaaaggaagctaagaatagtccctcacctcacagagttgtgaggattcgatgaaattagcagattcattgctgggatgtggtaagcgttcgataagtaccggctattgttattattattagaaactccaagctctgtcctcatcactctgtcctctaaaaatagcacagggcttctccctccgcagcaggtggtggtttggggggaaggcagaggtggaccaggagggctccgcgctctctcattctaaggaggtggaattctttttctccacttcttggcctggtctcctgacttaagattgaagcctgctgctcgccaatctgctcagtctggtagctgagggttttcctgtccagaggcctccctcaccacctcctctccagacctattcaaatgctacctcctccatgaagccttcccaaagctctcttcctgtcaatgccctcctcaaagctagaaccttccaatcaccccgtctgtttccacttggccgtattatttattagccggggctctctggaacagagatcttaaccggagggttatgactcctttgggatggcatatcagatattctgagtatcagatatttacattatgattcataggagaagcaaaattacagttatgaatccacaactgaataatttcgtggttgggagtcaccatgactatactaaagggtctcagcattaggaaggttgagaaccactggtctagatgaacagaaccgacagaatgaaggtatagcaagagaaggttaattaaatagcttacgtgacttagtctgggtaatccaacagcagctgccctcacactggaaaggcttatctctccagtaagctgcccagcccatgaggctggatgccccagcagtccccacctgctgccaaatgcccaggggagtcgtggaaagccattggtcttcactgtgcattggaaggtagaagaaactgagttctgtcagcaaagtggatagtggtggtggcagcagggtagatgagcttaccaataagacatgaagacagtggagcaaaaagcaaaggttttcctcagaccttctttatctggtgctacccacattcggggtaagccatccacttcaaataaacagatgaaaaaaaaatcctcctaggtaggtatgccaaaatgtgtctctcttagttcatctactgaccgtcaagattaaccatcatactcacagtacctagtcttagaacttgtgtttgtctcctacttagcttagtttaccagtgcttcccatctggatttacactggggcaaatgaatggtatcacttacaatgccctacactaatggatccacaataaacgtacgtgtctgtaaatgaatttagctgccattaaaaattggcaaagtaaggggcactggttttggtaattcagctccaagttaaagaaaataggaccaatgggacctgaaacaccaagagcagaggtgcgtctcagagcagactggaggcgagtggtgtccatgcctaaggaacagccacatgctcagccatcttcaacagaacctacggtcaccatatctgttctcctcttggccgtagctttgtacttataagatgactgccataactttctcccctaccctgacccctttttggttgttgggataaaaactctttcctttctctatccttgtccagaggttagtcacatgactgttccctaatggaggaggacagggagctaccaccaggagcattcctctaccctggttgctgcatggctgttggttaggtagacaccaaccacaaatgctacctcagctttgctggtattttgtgccaaggaagtaaggggcaatagaggaaaagaatgtgcttcaaagaaccagccttttgtggtggtcagaaaaggagctatagatcctagagcattggcccagactgaacggtccagttagccttccattctgctggcatgcctgcaagggattctctgagtgtgtgtgttccgagctgatagatgtgtctcccatacctgttgtgggtagcctgagaacatgttttaaacaatccccaacactaatgagcacccagaagagcttggctctgtgggccttggcaggggaggggctgcacaggtgatacatccactctggatgccatgggacattggccaaagatcgaccctgtcatgcccacactctgaggcaaagaggacactgactgctccctagcatagaagagaggctcaggtgggtgtctctgctctggatggggagtattaagacttgggccagtcctgagggggccctccactcacactctaggaaactgctgtcagagcaataagcactgccgccgtgaaaaatgaacacaaatcaatttgcgtctggatttactctcagaattccctgtggactctgtaaaatgcctttttacctcttttccaccctatctagctgtggaggcagtggcagatttacattagtttacatgcagttaaggtatttcttccttttggttatgtttttaagaacatttattgcctataaagaggtgttattgttaaagacaatggtgccctttaggtagcaaccgaatgttattttgtaaatgccaataaaactatttcatgagccaggatggctgaggctctgattaaaaggtgtttcccattcatatttattttggacgcctttgacagcatcactctctacatgaagagccacaagtaaaggaatcagcaacctggccacaggaacagaatttcctctcaaatgcacttcctaactatcccaggatatgcttaggctctagttaaggaccctgctaatagctggtgtaagaaaagattcctggaggctaggaggagtcctgggagatcatcagagccctgggaagatgggttggagcttaggaggggacaatttagctcagtgagccctgacatcagcacagtgggtatgcaaagtagacgtcatctccagacttagaaactctgtccctggagcaattaacccctctgtgtctctgtttctacactctgaagtgggcactggaacagcaatataaccacccttgcctgggggttaaaagaatcaaagaagtatgtcatagggctgggggtgtagctcattggtagagtatgtgtttagcaagctcctcatgttaagtttgagttgaacagccctcccccattgaaaacggcatgtcttgaaatgcatttggcatctataccaagaggacctaatgtctgtaaagaagggaggtgaaaaagagggcttgagtatgagagtttgccacatcggtctcctctaaacggtctagcctgcagctgtcctactcatctggtacccctgcattttcctttacctggtgttttctggtttttgttcacaagtggagaggcattttgaaccccttgctcatggctgaattgctcagaacacagagtttcttagagagtagacaagtgtaaatccattgtagagcaaggacttatttggcgcacactgagactactggtcaacctctaaagtgcagattctactaatttctgagtttaaatcatttggctaggtctgcactaaagtgactatcatatcataaatgagattgcagggggacaaatattgtcttgggtgttatatatagcaaaaggccataggctgggtggcttgtgaacacccaagttcctaaagacagagtagtttaagaatctgttccttgtcacgttcaatgtatgatgagcaccactttctcactgatggcacctcgttctctgccttgggaaagccctattgggtttcactgaaattgctgcctcctgaagcttccgtgacaataagtcaaaatggccatatgtatgtagaatcctggctagccaaaaagtactcaggacatttacagagcaccatgtgaccaggaggcctagaactctatgcagtatcccagagcaaggtctttcctttcatgctgcctatgttgaaatcctagatgccaatgtgaaagtgcttggcagggggtgggggagggacctttgggtaagtgatgaaggcaaaggccttaacagtgtccttgaaactgctgtgcccccatactgagacacatgggctctaagaaatttactgtggggacacagtcagcaaagaatgcatggctcagagaatctgcccagagtttcagatatctcctgaccttgtgagggtctgtgagccatatgccagaagcacaggtcaaccaatccagatcctaaggatgatgtctattcaccatcgggtactatcagaagtcagttaccatcatttacatgttgcaagggagaagtggagacccagagaagtgattcagttggctagtggtgggctgggattaaagccaggagcccacatgatgcctttcatgggtagggtcttccttctgaaacactgcatgcagtcagtcccgctgggcagtgtggaccgagtctctgtgtccaggtgaaagtacactgacctaatgttacagtggcgatcaactggataagtcattactaccattattctttagctctgaagcacctctggcagctgtctccttgacctccgtattagaaagcaggtgtggttatacacgttttatttctatatagagaatggaattcagagtctcatgcaagctaggcaagctctctctcccactggcccagccctccaccccagttcccatatgcacttcaggccatcataaggatccccactcttcggattccctgttttcacttcttttcaaattttctcttatgaactttattataaaaaacttgcaaatgaaaacatcatagacccaaattaactggacctaaaatctggacaccacaatgaacgtctacggagttagaattgttttcctttctttccagacccacaagttgagccttttgcactccctcattaagccagacccccaaacattaacaaagatgcatttcacactgtccccaagtcccccaactcactgataacggtgcccaggaatctgaaccatgttttgctgtttaccaaatcctcttgctctctctgaatcaacccctaccccagcatctatagcaggtaaaacctggagggttattttagatctctgtatctgttcatagacaaagtaaagctgaaactgctcttagattatttttttaaaacattccctggttctatgttttcacacatacacaaagacttccttcccccattagttaaattttgaggttttgcggcactgggagacctgtaactgacacaatgcaagcaaaagcttgggaatgtaattaatgcaggaataacagtgcagggtggggatcttggtattttaatgaggactcagaaacatctcactgcagatgttgaaagtggaggggggagatgaacgttgccataattaatgctgcatattaaacagtgacctctttggtgtaatcaatacccggacctcttaaccttttctgtcacctggaccatcactcctgagactccctggttctgctaataaaaaggataatcaccaatccgcgctcatttgctgtggaatctttccaagttggtttttcttttcttttcttttcttttcttttctttttttttttttttttttttttttaggatgaaattagaaatcactttttttagcagattttttatatgtgtatatattttcctctccaatatatttatccaatgcttgctctgtaatgagtgttttaactttctgttttccctcccattatccctgaaaaggatggattatggagaaaagattaaagtagtataatgggatccgctgtttgctaatgtgctgtcagaagcacgcgggtctcttatgaatgcctttctgactgtagttacctcatagacttgggaacccgtttgtattcttgcaggcattaaatgtcgtctttgaaaaaatcccggaaaacgagagtgcagatgtctgccggaatatttcagtcaacgttcttgactgcgataccataggccaagccaaagaaaaggttttccaagccttcctaagcaaaaatggttctccatacggactccagctcaatgagattggtcttggtaagtttcgttttcctcccactttctttctgttgggtgacagttatatggcctgagttgtttccagagggcatgtccacccatacgaggactgtttcgctctcttttgagcttcttgattcttcccaggaaatatcatccttctgagataccatttaaaaatatatacactgtatttgcaaatcaatgtgattgtgacccagggaccacatggaatcaccctgcatgaaggaggacagaaaggtgtcaagcctgtgccctcctggatgtgttgcacttcacactgcatttgatttgtttgttgtgatacggagcgtgtcattagcgggtggctcagccacacagtgttaactccagcctgctggaaaggtcatcttcctccctgctaatcgcatcctgcattaagtgtatcctccgtcctcccccaacacgaagcagcatctgctgtgaattcatttgtgggctctattggtatactgcaaaggagagcatatgtgtgagcaagctcacagggctccgtttctctcaaatgttcatcaacattttcaagttgagctcggcgcaaccctcccaggagactgctgtgggattttagaacagataatgggacaggaaagaagagtcgaattgtggcggtgacagacagcgtaacaaggttcatcttcccttcatgtgcagttgtaggcctccactaagcaggcaattaaaatcctcccccaccaatcaaacctcctgctaaaaccattgagaaaagcctagaggcaggcctgggaaatttgggggaggccatgcaaatgtgtagcaacttcagtgcctgcttcgaagaaagcaggctgcttaggcactgctctgtgccagggttttgtttccttgcatggcctggagtactcaacagcttgaaacgggtttaactcctttgtttagatataagcagaaggggcaaccccatctaggggactggtgcctgacccaaaccatcagcttccttgacttgaatattacctcgcaagtgtgtggctctgaccacaaagagcatgggcacacccaacctaataaccacaggaaaacagcccagcagcattctctttgccaccggaaagtccacaggagtgtctgcaagggtttgtgccaaccaggtgtccctccctcaaccccgaagctgggaggcaaaggtagaacaagctggtggcattgtgtccagattagcagaaagcatatatgcatagaatgttaccacctaggaatcggaaatagtagggcctgacctaactgggaaagactatctaagacagcagagccatttgagttgccttgtggcttgttacagagccattgacaccagatttggggggtgacaggaagagatgagacagggtctcactgttgtagccctagctgacctagaactcactattgaatgcaggctaaccttgaacctgtgatgatcctcctgcctcagcctcttgaatgttgagcttatacgcatgagctattaccatatctggccattgctagatttaaaaaaaataatttttatttatcgtgtatgtgagtgcacatgtgctcattgttgggcagacagaagacaaccatgacagttggttcttgccttctactgtgtgagtcctgggaacagaactcagattgtcatgtttggagacaggtgtctttaccaactgagtcatctccccagctcccattgctagttttttaaaaagagaaattgtaagtccagatttgcgcgcgcacgtgtgtgtgtgtgtgtgtgtgtgtgtgtgtgtgtgtgtgtgtgtgtatgtgtgtgtaacctccaaatattcacatgttgctaaattgttatgttgatagtaacataacaattcataaaatactgcacaaactcaagaaaacccaacactcatctgtggttcccttgtgactatcatgaccatcgtgttctagctgggttggtgtgttcataaacagtaattctcaggagccatggagaagagtgttcacattgtgctctgtgaatgagcatgcacatggactggtaatactggagggattttttttaaaggttttaatccttcagatgatgggtgattctgtcttcagggactccacttccagatttgatttggtgtcatgtttcaggaacagtagtctgaaatggttggctgcagacacaagcccaaagcttttggtccatctggctatctccatgccttccaacaaagctttaccacttcattcatgctattaacattattattaaacattattaataatacttgtaagagcgactaggtagcactatatatttttttttaactgtgattttagaagggacccaaatgcctctcccctttctcagagcttcaggtgggaacacggcagaaagaactcctggacattgacagttcctctgtgattcttgaagatggaataaccaagctaaacaccattggccactatgaggtaagatcaagacagccttacccactcctcctttacccacagtccttcctgcactgggtaactcaagtactagaaaagccctttacaaacaaaacaaagactcgctatttctgagtggttcgcaggctgcctatttctaagagagatgctttcctcttctgctcattcagatgagccctggcattactgtctctcgtggcgtccctatcacatgcccccctcctcataagacatagagtatcatgccatctgagtctctatcttgccatttagatcagagactttgccttggcaaggctgcctggtcttatgcagtgtgttcttaggaaaactgggtgaattatcatacatgcatgcccctccccggcatgtcaaatttatcagtgctgagcagagtagaaccctcagcctcccctctctccactgtgctgaccttgtgacctcttgtgcagagaacttgttctcaggaagttcgaaatgtcctgttggtttgcactattcagtgatgtccctttcagccccttgacccccttcaacctcttgacccacacgctgggtgagcgatggagtcagtgaagtgtgctcatgatgtctcaagagaaacaagtgccagaggcctgtatgtgacaagacaggaaccagggcaagttcctgaaaacagagcctgggattcattcagcagcattggcccagatctttgagtgtctgttacgtgctaagaactgggacagtagggagaagaagggaaggtgacacctcatgatacaatagtgctgcagactggagacccatagggggttttatggaagccatagctgagctgagtctggtgctgggctatgtctatctagcaggggaacagagagcaggcatgttggacagaatggctctcagactggtcagaacctgaggaggaactgtgctagcctgagaccatgctgggtggcatgttgactcagttcttctggtctttggttagtaccatcctgcagcagtcctgtgagagaccagccattgtttaacctactgtatagatgggctgagaccaggggtctgtcttttaacccgccacttgggcttcttcttagtttatatctcaaggacagtatggggcatcagagggcctaaatttgttctctcagaaagtggctgtgatggacaggaaatagggagacccattggaaactgtgggaaaccttcccgtgaggaacagcattgtctagaagagaagagtgtccctagtggtcacagggggctcagaaagtggcactgtagtccttctagatgaagtgtgtgtatgggggtcaagggtggcactcagaagggggagttgctctctctctctctctctctgagaggagaagtcagaggaagagtagctacatcaatgtccaaagcaccagggttgacatagggctttgccgggctccaccttcatcttgtttgcactcgagacaagttcctaagcaggtgcctggagagttaggagccggaagcatcccatcttgcattttgtcttgcctgtgaggccttgcgactacttctggagacttgacagagagacttatgaccctgtcccacgtaagtcccctacagtttaagtttcctgacccagaatgacctggtcaaacccagcatccttagcttgggggtggggtgtgtgaaaattcccagttttctcaggatgggttcctgggcagcaatagtcccaagggatgtaagtggatggaaggtctgagaggggtcttagtacaccactgtgcattcagggctttaggccatctcctctccatgggtctgggtggcaaggtagtctggttgtccaaaggcgtcctggtattgctgttcctttttggtgctcttggctggagtattagccttgctccaatgagcctcccctgccttattgccacacttcaccttcaccccaactgtatggcgctgggtgggaccctgaagagggggtggggtggtggccacttaatgcttaatagggataggtaggacaggtcattcccacagagaaaacagaagcacacagcagtctgcagggcacaggcagcctgtcaggagagatgaagcatcactcttcctggagacatctctcgtactagacacctatctgcttaaggatgataatgaaattaatccagcctgtagtcacttcccgtcctgatgatttattggcctcataacccagtgttgctgcctggtggtaataaatgacaagaccaggacatgagagcttaacggattctgcttatgtttaaaaagataagctgcaaggcaaataagtgcagagcgcttgaaggaatccagggaggttagccggccacgctccctaaagctggaccagtccaaagtttgcctgcctcagttcccaaggactgagctgaagaaagaaagcttccaccccacctttggctgcctgagtctgcacttgattttaatagcacctctacagacttgaaatttgggataaattgagggggctgggctgatgtttgcttttgccctttcgttaaagaaaaccattttcaagtacttgcgtttccctcctaagagacgagatggtaattatcactcttattcatttaccaaagcaccctagtttgagtcactgtatgtgcttgaaaggaaaaaaaaaaactatatttcatttaaaaatagggtctaattcagagttctaagtgattcagacttacctccccccaattagtccaaattagttaggctttaatcgtcagtgacggccagtccctccttctgtctaaacagagtctcctgctgaagtgtaaggcccagcttcctgtaccgcattttgtgagggcaacaatgtggtgtggcaactccttacttgacctttgctctgagaatactaagggggcgggtcaaagagtacagaatatagggtcgggtaccgtccccagccagagctccaagctgctactgctctgtcaacctactgcatggtttccaatccaactcttagcgtttcaacagctgccttctatggcagcagctgtggccgtcagcacccagccttgtccacagtcccgggctctactgatgctcaccctcacctgatgcttttaggccagaagtatcgttcctcttcattcccatgaggtgcctgcagaggacagcaaagctttgctccagtgttgttccatcttgtgcaagaacggggttgtgagcaaacgtctttataaacacatgcagccagcagctgcatctttctctctataatgaaaccctcccaaactcccctatctggctctggctccgggtgtttgctatgaagggtatcctattagtagcattagggtagactgaggaggcatgcttgcaggctaggctttctttctccttccttcagcaccccctgtgaccttttgctgggctacactgtcacaccctgccattgggtggcatggggggcttcgggtcaggtgtttatcaggggcaggaagttttctctacggatcacacatcttgttcctagctgtgagttttggggagggagaaatgataaccactgagtagttgaagaacattgtgtgctagtgatcaggtaggtactgctgacattgagtttgccaggtcatttataagtttgtttcaggtgatgtgtgaggtcagagccatgctccgtctggagatgtttcatctctgctcctaaataaagactggactatctcaaaaaggcccctttagatgttggtttatttaaccaacaaagagactgctgctgttccacatactgatctaggggctttgccaacatcagtaactttggtcccctttactaccctacgaattgaatactgtcatttatattcgaggctggggagggtaagaaacttggccatattcatttggcttctcttgacacaccaaggtcacccaccagctgataaaaagaatttccctcccaaaccatggctctgcttaaggccagcagagcaaagctgtttctgagtgggggttgtagcccatgctccggatctcaggcttcctggatggagagctgggcctgatctcagacataatctggtagtaagagttctctgctcccgacagaaaaggttcacttctcttgaggccgtgggatgaatctcatggctcctgggacaagactctttgagtgaatagcctttcagagtggctctgaggaatccaagataccagggaaggttgccccgaagtaatttgtattgatcagtgtgctttttagattattttccttacattcagatcacattcatcattttccgtaaaactcagaggtataattccataaattaaaaaaaaaatctgagccatatgaatttgctaatggttgatcatttttacatatacaaataacattttatgaggattgaatttattatttatgcttatgtaaaagtacacatgtgtgcaggtgccttcagaggaaggcagagaaaggtttcagattccccctgagttggagttctaagtggttgtgagccaactgatgtgtatagggaaccaatcttgggtctgttggagaagcagtggcaaggcaaatgctttaaccactaagctgtccccacaagtaacatgtttttagaatcttttttttcttatgtatttactcattcattcattttatgtatatgcatgctctatttgcatatatgcctgcatgccagaagagggcatcagatcctagtatagatggttgtgagctgttgcttgctgggaattgaactcaggacctctgaaggagcagcagacagtgctcttaactgctgagccatctccccagcccacaaatatcatttttatatgattaagtatgtttgcattttgtctctagaaaaatctattttatggggtaatctataacctatgacataaagaaagcatcttgccatcaagatatctcatttatgcacagatttattttgaagtgactttattagcttttgttttagacaaaggcttcttatgtagcccaaactggcttccagctccatatgctcaagctgaactcttgagcctcctgcttccctagcctgagtgcagggattagaggcatttacaaccacacctacttcttgaagtgctgggatcaaactcagggctccgtgcgtgctaggctagcatcataacagctgagctacatcccaggcatggctttaaattgctgacatgggttcatttcatccccgtgtggccacaacttctaactctgatgatgagaaagtctatacttctatcacctcctgggctggcgtcactggagagggtttcatttgaaaatgccatgtacacctacctattctgccctgggctggaaaaccagtcctcctgtagatctacctagtagcattaatctttccttgatttaatttggtttccatccctaaagttggggctcagatgatgttccttgcttcacagaaggacaagtagatggatgtgacactcagggaagtggttggagctcctgggatgcaacaaacagccactgtggttttaactctttggatcccatggcacttttgaaaaaggcatttctggccagaacttggcagcagctgacttgagaatagaaatcagaaaccttccgctcccccccaaacatctgcaaattatttttctgtccttataatagtgttaaagcatcacatggggtggaaatgttccagccctagagcagctgtgaaggttaggagtatgctcacacacatctaacttatccactgataaaatgcttttacaccagctcttggaagatcattttcggagcaaaatctcctctgttcaagctgcatctacactatcttaatgcctgagcacagtgccagcagccaagcgctgccagctcccgaaaagacatttgaacttctggcagcattccttatcagaaggcccatccatggtgtttgtgattatagaggaagggtgctcgcttttggcaaaacaaagcgtctgacagtagcgaagtattggctcaacactcaacaggatccatttgggattcattctttgacaattacccagaatgaatcaccagcttccttttataaaaggatatttattggcttagaatcagtacatccagctcttggtggggaggaattttgttaactgcattcacacattcttataagtgtggtgtatgagttctgctaaggggaggcctgcacagggcatttattttaattgcctcaaatatggagaattgagaaatcagtccgaaaaccatgaatggctcaaggaggatgcttgataataacagcagtccaagagttccgtgagaattaagaacacttgctagagtcgcctcgaggcctgatggtcttgctagctctccccagactccccctcttcccataagatgtcctgaacactggcagtgggaggcttctagcctaaacttagcagctggctggacacagctggctagacagctgtgtctgaggcccctggagagctgcctcttcctctgtgggtgtcacctgaaggagattgtgcttaatcctctggtgcttagcagggaggtctgtacattctgataaccaatgtgcagcaagccaaagagcaattctaagattctaccccccactttttttttttcccaaatcagggaaggccaggtccaaatttgtattagggctttaaagtggagaggaaagtcacttagctgataggattcaaagtgacagctgctctttaggcctcagctgaagggaggtagggttggtccctgattttcttcctcttgaccatgctttgtcttatcctgtggaccaccagcccctccttcagaaccatttattcttaacccctgcctgcccattgtatctcagcatctgtgattttctctgcccaaaggtaacttgtgtactaggcatttctaaggacttaactggttatgcaagaaagaccctggcctctggcccagggatccttggttccaaaaggccttaaagtgatggtattgaacttcatctcaggggaggtcacacgtaggcatggcattcacatgattgcacgataaaagcatttatcatcaacctgcacaggtaaaacctgaagtgatttttaacagaactatactgagttatggtttatgtttcccaaagcttacatgtttagagaagaatgcagcttggtaatagaaaactcgcttagcaagcagagagccctgggttcagttcccagtaccaggatacataaaaaaccccaaaccaacaaaactcacctgcttaaaatgtgggagccgggcatgatggcgcatgcctttaatcccagcacttgggaggcagaggcaggcggatttctgagtttgaggacagcctggtctacaacatgagttccaggacagccagggatatacagagaaaccctgtctagaaaaaaaaaaaagtgcgactttctgcatcatcgctgcctgactttagaatatttcatcacttttaagagaaactcactactattcagtctcctctataaccccattaaaaaacaaaccacactaacagtctatataaattggcctgttctgggcattttaaatgaatgagatcatatatgtgatcttgtaactggcttcagttagcatatttttaaacttaatccccaacattgcatgtattagcatttcctttaccatatggaagtttttgttgtacattcatatcatgggctattacacagttatgaaaagggatgtactgacaggcacagtgtatattaatagatgatcacaggccttatattgaccctaaaaagcatggacaataaacacacactatgtactgcttaggtccatttttctgactctccagagcgggtaaagctagtcactgaggcaagtccgagaggggactgcctgttgcctgggaatggacagacaggtggctggccattctcaaaactttgaaatgttttacaaaacaacgttgatagagttacagcccatttacacaaatcctatttataggaatgaccatagttatacatgtaataacacttgtactggctagttttatgtcaccttgatactagctgaagtcattttggaagagtgaacctcatctgagaaaatgttccccactagaatggcaagtgtgaagggcattttctttttctttctttctttttttcttttctgagacagggtcttactatgcagctgtgtctgtcttatgtagaccagattggcctcaactcacaaagatcagcttacctttatctccagagtgctggaactagaggcatgtgccaccatggctggcttgtaggacattctcttgattgatgatttatgtgggaggagccagctcactgtgggtggtgccatccctaggctagtagtcttggatgacctaagaaagcaggctgggcaatccatgagagcaagccagtaaacagcactcctccatggtctcagcagattcagacgatgtgacagaatgcatctacttgggggctcaagcaacaaatacttatttcccacatcgctggtgcctagaagccaaggtcatgtaccaccagacccaaacctggtagtcgaggcctcttcctaattcagagggctgtcctttaactgtatatgtatgtgcaggtggtgggacgagaggaaggtcgggtggggtaggcttggctgtcttctcattagaagggcactaatctcatttcaaagggcttctctataggatttagttaagggccccacctcctcataccatcatattaaaattactcagcatatctatttggaggtacataagcactcaactggtaaaaacaactggtagaaacctgagggggagaaaaagccactcaggcctcttgacctgcttggggtaggggctggactaagacggcttacacctcccctctctctgaggcagcccccatcccatttaggtcacagggtacactgtcccccacacatctagctgtctatgtgtatccttcacagggccacgagccccttgaactcagacagtgccctcctggtcgcctggttaaccccagactgcatgccgaatgtagcagtccttgagagataataagtgagagaccatagtatctatttaattcctggttgaagctgaggaatccattatattttgaaaactcacatgttttatccctgttttcagatatcaaatggatccactataaaagtctttaagaagatagcaaattttacttcaggtaaccaatataatatcatcaaccttttgttctcaccaaactttatgaagtattgctttttttttcttctcttagacatactgtcacaggggtctgactgagttgctgctatgtaattctctggaagctgagacaagccattctgagctgtttctagtcctaagaacatgggttctgcaagaagggaaggaaacagtaaccatgctgataaggaaggcccaacacaaaggaagctgctggctctaagcagctctgaacccaggccaatctcaggccacggagctcttttctgagtcctcagtacgatgggcagcaacagaagtgaccaccctgcacaccaagcaggaagctcacagataatcaccctgccctagacaggctgagcaagcatgacatcctatgcagaatctccaagataacactgtagacttcccaggcagtggagacgggaggaggtttacaggaaagtcagcaagctagtctgtcttcctggcagctgtaggacagaacaaccctgataacaccttgagaaaatctgttggtcctgctctggatttgtctttagtcctaggcaggggcctctcctcagtgggcctcctgtatacacactgcaggcagggcacggggactctgatagactcagcatctagtctgtggaaccacatccctttggtgagtcccaccttccatcacgacactggactatacaaagccatgttactgagtggctgtcattgtgggtaaggagagcgacgtggcttttaagactcatagattgggcttttagatgagcctgctgctttaggaccaagtagcaggatcttagggttgatctcttcatggatcacaggcatgctccctctccctgtcctgtgtggccgagtatcagtaggacagaatttgatttctcaaccccttgaccctctgtggccatctcagccctggatgacccaactcttagccaggcagccacaggagaaaggcactcagccgtccagttaaggctggatgaattcatggcgttgaacttgaacagggatcttgataaagcctaaggctactaatttttcaagcacttagccctgttctccagggggctcctacacagagctgctgctgtaggactagataggactttgcctttcctagtgtaattctgactccctcaaatccattatccaatccagcgaggcacggcatttgcatatctccgcacccctctccttcaaggctaatctgtcatgggcactttaggacagcccccttccccttaattgctttaatttttaaattttagtagcatttctagatatgagtcccactcattgtcagggccttcatctattcccctgctcccacccccatgttctaaacctccccttgcttagtgactctctcagttggcttgccctctgagctggacacactgtcctatcttagaaggggtccaattgcttcccactctggagtcttccccctatttacctggctaatcatttactgaggttcatctgtaacatcccttcttcaaagaaatctcctagtctcagattgacacctttttacatagctctctctctcactgaaattaagtaattgtgtaattagtagcagcaggaacaaggctggcttaactctggctgcaggcctggcacacaggtgttccaggtctatctgttgacaggctaggaccccctcctccctatccccagttaagtgtctacttaacctctgctctaacatttgcagggccagggagcctgcttccactccagcccctagcccctccccacactgctcaggtgcagcagagaatgtgcagctgtgaagagcccatagataatagcggagccattggctttagaacacaagcagggcttttgttgaggccaattagtccgtggttgtttttttaatgggcttcttttttctctctccctttctctggtgttcagatgtggagtactcagatgaccactgccacttggtgagtttggcaggcttgtgctgcccactgatcggcgtgcctcccgtagcattcagtcccccaggtaatgcagagtctgctgtcgtctctttcagattctgccagattcagaagcattccaagtagttcaagggaagagacatcgagggaaacacaagttcaaagtaaaagaaatgtatctgaccaagctgctgtcgaccaaggtacactcactgttctaggaatgctttcatggccaccttgggggtatatgatgtgttcaacttaatttccactcaactgtgaaaatgttacaaatccctagtgccttctagcaaagcaaaatgaaagtttaaattgtagacacatcctctaccccccttcgatttttttttttaactgaaaaaagaagagcacttcataaattcctcctgcagcatcttcagtcagggcgtttaccaccgctcctgctcctctgccaccatctcactattatcttttaggctgacagcataattattcctttttgtttacttgttattatagataagcaataaaactcctttgaaatgcaaataaaatgagggggaaatctgtgacgattaacctagtagatcttactgcctttttttctccatcttgaaattaagaattctgttcatgtaataaaaaagtgttagatgtggaagttagaggaataccaaatcaggagcaaattttaccgcatctctttctgggggttagtggaagtctctggatttctgctccactactaaccattactgtccccctggccttgttgttaccttgctgggcaggctcccttagcaaatctgctcagacctgaggagatctgtgtgctaggcagaggagtgccggtgccttttgattgttcagttttcccagagagctcttcatactcaacttcatactcgactgctttgggaagtccgtatttaaaccccgagatggaaatgcaggcaacaggcaacagatcaagcagtggagcaccatcactcaagattatccaggctgcacacagtaaaggccaaacaacaagtggcttcctgtgcacacacgcacgcccacccacctacacctatctctgcatcatactccatctaaacagtgttgctgtcagcaagtttatatagcagctctatctgtgagcacatgcagaactcttgtcccacttcctgctgacctcctctgaccgtttcccattgcccctcagatgactttgctctggttagtatatctagctctttctcggaatttggagctggcttttccatttgtttttcagaatgactcccgtgtatctcagcctccccttctgtcttccaggtggcaattcactctgtgcttgagaaactcttccgaagcatttggagtttgcccaatagcagggccccatttgctataaaatacttctttgactttctggatgcccaagctgaaaacaaaaaaatcacagaccctgatgttgtacacatctggaaaacaaacaggtgggaatgtaggtgattgctggctgtcttcaagaacctagagcataatattatatacagaattactgtaccagaatctcagggtttgaattctattctagatgataaaataacaaaattctgttatcttttaatgcatgaaaggggacttgtctaaaatgttagactagtgaggaatgagaaattaagtgttttatggtttaacctattacttttactagactgttcctgtgcctacataattgctttataatttccaagttgtgtgttaactgggattctacatggctcatgctcttgtcatctgtggtagtagacagtgttatttaatttacatttacctgaagaagcaggatgtccccacttacgctggtatctcctcagaagactgctatagctcactgcctctatttgaaaggctgtgcacctcagctgagacccagacatggcacaatagcatgtctcacgtgagctcaaagccctctaaatgctagcaagcagtaaaggtgaagttcaatgcgtagtcagttttgccctttgctctgggtttatatgctttgctctgggctcactcctgttctcagtgccagcctcatatcccccggctcgacaacccctacacccagcataggtactaaccaccagccacaacagactgagccattgacaatcccagcacccatgtggtggcggcagtaagctaggccaaagttggaacagagatgtggaacttgaatgagtctcaagttcatattccattatttctttaactgtctacactgtgccatattgctgtggtatgggaaacactttaagtttgtcctccaagtgtgaattctagtaggtagagagacggggtgcattcgctgaagtgcactagaaggtgatgtgtacaatggagaatataaaagagggtcagaggatcaggccagggtgtccaaggacagaccacactgtacagccctaagatgtgatcgtgggtgacatgaattgaagacagtaaaggacctagtggagacgagctcagttaagagtggcaggagaggagaccctgacagaggacaagagagaagtgagtggtaagatctgattctcttagaaggatcaagatctggggacaaataatccagacaagatgtcagtggcttagaccagaggggctcaaaggggtcaggcggaacagatttgagtgaaaagttcttgtttgttggtgacatcatctcatcgaacccagatatggaattcttgtccagggtcacttttggacttcctagcctgcccttcactcactggggggtcagcccttttggggtctgagtgatgctgccacctgctgcttatcagtttggctaagcgggtttctgtacttgggtaacaaggtcagacacactcatttacaaactggtgcacagagcaccggctgtgttaagtcctgcctgagaagagactgttttcccttcaaacagcctccctcttcgattctgggtaaacatcctgaagaaccctcagtttgtctttgacattaagaagacaccacacatagacagctgtttgtcagtgattgcccaagcattcatggatgccttttctctcacagaacagcaactggggaaggtaaggcccagctttgctttctgataagtatccctgaaatcacctcccgagactgaggtttcatggggacttcaggtgccacaaccctactcggaactgccaacgcttaccatattcccatggaagcctgccttcactccgctctctaaaacctcccgtccctcttatttcctctcatgtcttccttccctccctcctggacggtaactgccttctaacccacacccatggccctgctgcccacccagccgctaaactcttcgtcttcaccatcttagtgcatttcttcctacaaatggcatctttgctgtgctacagggccttcctgactggcctcggtcctgttagtgaactcctcctccatctgccagagtttgatgccacaaacacaggttcttgatttgtaagaagaactgcaagaagactatgatctgtttggttgtgtctatgaacttgcccagtgtgtctcctataccatactgaaaacacaatgtgcttgttcccagtaaaaggagcttttagaacccgcacttcctaggtttagttcatccttcagggactatgcttcccattctatagatgagtgaggtccagaaggtcacaggttttgttatcacaaagtagtttaactgtgaactctcctctgtccagctgagtagtccttaccctttcctgcagtctgttagtgatgcttcacatcacactcaggcagtgaattcctcttcccaagactgtaagcttctcaaaggcagacagcagtcactgtcatctctgtacatttgatgtctgccacagatacttggataagtaaatgctaattgaatggatggtcatgcaacttgcagggtccacttcaaacccgccatgtacctctcaggaacatctcagtgcaggcagccttcaaaccagttccccacgccactgattcagtccctagactcttgtaaaacacactgggacattagtctaatcattaattcaactatcttcatggacattttaaaaacatttgtcaacaatgatttcatcttcatttagttgcttacatattcctactattatatttatataacaccatgcaaattgccaaagaatacttgggaaatcggacatcagagttaccagtactggtgacatgtgcttcctagacaaactggaagatctttagaatctaatgaaatgaagggacaagctagaaaatctgccactgccaattacttaccagttttacagttatataaagggctcaatcagttctacaatcaagtcttttagaaatgccaaaattcactggtgggtgagggggagagcaacgttttaattcaggctttttaatggccattagtaatgaactgtgattgaaataagttccattgttaccgtaactcaaaatcatgcaaaaataataattttagttcttttatgagaggaaggctgaatatattagcatttaatctgcctgaaaataacagtgactcaccagaactatctagatggcagtcactcactcagtcagcattcactgaggcctcctgtgtgaagccttgttggcaggaagggatgccggtgcaagttcagtcacattgaaccactgtacacccccccgtgactttatgcttcgtgtggctgttgctgtttttcaggaagcaccaaccaataaacttctctatgccaaggatataccaacctacaaagaggaagtgaagtcttactacaaagcaatcagggatttgcctccattgtcatctttagaaatggaagaattcttaactcaggaatctaaggtacaacaactacgaagcagaaataagcctgtatatttgttacttcaaaacagtcatttcagagtctctcaacaagccttttttttttttttcagaaacatgaaaatgaatttaatgaagaagtggccttgacagaaatctacaaatacatcgtaaagtattttgatgaggtaagttgctttcttttttaaatttatcacagtttagcccacgagcccaccacaaggaattgggtacagccttccatcccaaataggcagaaagggaggccctgagccagagtgcacatggctacccctcttgtagtcggtcatgctgcccacctttggaccagcctgaatttacatttgagttcatggggcctaaagccacaacaactcaagtaaactctgattagtaaactctggcccttgttaattgggccagttcatgtttgattgtggtctgcgaaaagtgaaagctaagcctgttgcatcacctagattctgttttccatggttatgaggtcacgacatactactcctaacttaagcaaacaccaattcacactgttctcaggtttgttatgaccataagtagcaactaccattcacctttatgattaattctccttaatctggattccttgtttccaaatatatgttaattcccccttccctgattcccccctactcagtcatgctgggacaggctatccatgtcaatggtgagaatagctcaccaattccatatgctacttgaagatcaagtgaagagctaaggtagggtagaggcaatgagtcccttaaacatgataagcatctctccctctccaggggccaggggtgagaagggaagcactccagaggggagggaggggaggggagggagggagagagatggaaggattcatctctgatcaggatgcccttgcctgctgcatttgaggaatacttgcctgcatgctggctgcccagggatgcttgctgtgcttggaatggctgtgacataatgcataaaaagagggccttggaagtctggccccatatttgtaagcaaatagatggtatttctttcgggcttctatttcaagcccaagtgttgttgatcctgtgataatgacttagcaaaacaacttgcaaagtgagtatggaaatgatcgaagaaactgctggcatctgtttcatacagatttttaccactcacagcatcaggaatgcaaaaaagaaaagagagagaaagagcaagcccaccagaattgtgaattgtactgctaaaactctaatatgtaaaataactgttctaattgtcaacagattctaaataaactagaaagagaacgagggctggaagaagctcagaaacaactcttgcatgtaaaagtcttatttgatgaaaagaagaaatgcaagtggatgtaagcaccctggggcctggctttatttgacaaagttcttcagacagcttgggagcaaactggctgcttgagctactctttgtcgttaatttcttaagtttgcacatgggttccacttcgagcactgtcctttaggagaccaaggcacatgcacagcttttagaaagcgttatcaaccactgtgcctgtgggtatatcgtgggaacctttctgtaaatagagctgaagtggttgttgcaaacagcctccttgtttacagagaatacagggccagtaagcaagtgtcagtattgtaactacagtctccacttaagcacaatgatatctaagtggttttgttggaaaactacagctatgtagtacttgtgactacactgtacttctgcagaagaaaggggatactaacaaagctcagagtgtggaaggagtcctttggaaacccggagggggtgttagggcaaccctgagggtctgcggcattcctcctctttccccagtagttcttggaaaggctgaaggcagaatttggtagtgtgtacacttagcattcgtgagtgtgtgtgtttaaaccaaaaactaacagtgttgcaacattgttgaaagggctcgtgtttttcagtggttgccagccgggctcctcagcccacctccatctcatcaacgcagctctaaagcaaggagagtgggtgggtctcactgaaatgcaacagcagttttcccagactctgtcctacggtgtgtctcttttttatcttttcatgtatctggtagtggacatgttgggtattgtaagaaaaagagttcatgactttacttctgtttgatcagaactgtctgtggatgtgtaagtcactcctgtaatcttacatttctatgctagtgtctccttgctttagatttctggtgaaccctgtggttataaatacttgtgtgtgattaaaataaaagatacattttacatttcatcaaattgttgttcacattggagtattatatataaatatatatatttgaggcccaaggcctggaaaatattagtacaacttggtatcttagtcttactatgtactttttgaaagtattccttacaggagaaagatttaaaaatactcattttattcgtgcctctttttttttttttcaaagaatttcctatcaagttatactgtagtcttttttattgctgatttttttattcccaaatttttgctgctcgtgaccaattttaataccactgtgctttccttctattaaacagaagtaaaaagtgtcacctgacggccctctcacttaccttgtggcaggcacccctacccttggggttccaaacccccagtttaggaaggacttttctttcaatcagccaatcaaaccttgagcacacattcctcaaaaccatttaccagcactgcctggcccatctagactgcaatgtcctggtaaatggcagtcctttctcttccttactatctgacacctcaacagtgcagtggctgccctgacagacgccctcccaatcttgtttcttgtgactactgtctgtccaatggacacatctcaaaactactaccaaatagtctatttctaagtagaaaggtgagaggtctggtccccatttaaagctgctaccgtctttaaagaggtgaaggcattcctaagagaaaagttggaggagacttgagagccaagggtaggagaattgcccaacaaaccttcccttctctggggaacagaaacgcaaaggctgagccacagctttagctgtgttacaaatgctacaccagggggtccctgtccagctctctgacatgagtcctgtgtgagccttaccgcctctttcaggagttaggaactttgggcaagtcacttacctctttgtgcctcaatttctgtatactatttctaacctacctcactgaggtggtgtgaagattcactaatgtatgtagtgtgtttgtcaatcctccagtggaaagcactatctagatcacactttggatcccattagccaaatgcacagaatgtccaaattagatgtgtgctgaagacaatcagtcactgggcctctattcaacaactaaagaagcaaatgacaaacagtatctagtttcaagtttctttgcatatttttggtgcaaaacaattaatttataaacttttttttctaacactagtgtctaaagcagcacttaaaaattacttctgttatcttttctgtattaggatttaaagtctatttcttactgtatacctgactgaagttgttcttggagatgaatgttttaaatgtctatatccaaaaataaacattttgatgtaacaaatgtggactgtttgtcttttctagttttaataggtttcttaacctaaattactttccaggaacaagatgtcacggtacattgcatataaataagcagctccgctcagtaaaccaagctccttgctaaatggcgccaagagctgctcacttatattcctgtcttcagtgagcaacctgacttttggctgctgagacgtctatacaatgacaaatccacataaatttaagcttccgtttgctgacatgaaattattccagtggaatccctctaaaacattacataaagaagcttccaaagatgcacaatgaaaacagaaggacataaaacatcattatttgatccttacctaacagtgagaaaccaaactaaatgtcagcggtacttcaatacctcactgcttcaagtaagaccaacaactctttacagccacaggacttcattttctaaaactcaccaaagccacagaagtgatgccatctcaactgtttagtacatattctatgatcaggaaaattaaacacaaacagcagagatacaaaaatatttattaagttattcaataaattaagtgcacagcttttagaaaaggtaaagatttctataataaacatgtttagaaacttttaagtggtttttatacttataaatgattatcttttccaaaacttttatatataataaaggagatgtttattggttttgtcattaccaaggaggcatctcaaagatgaggaaaagggacttcagggtggatatatttcaagcaaaatgccagaaaatatcaacaaaacagaaattaatttgaaaacttgatttttttaactaactagttccttttatttttgcattgtcaaaagattgtcaatgcatgttctaaatatatgaatactttcattttcttagtataatcctaaaatcttggagcccatgcagtgcgctgctagtaccttttcttgaggcagctcatggattttggcaaacaggaagaaggcgtctcagtgccacacgttacccgtcagacttttattgagtctctggctttgcctgtcttcaggcttcactccccaggagacccaagctcctccagttgttttctttgtgtagtctccagttcttccagtcttttgcgaaggagagagagctctctttgatgttgttcctccttaaaaatgacacattaagagaaacctagaaaaactaggaacgtccctgcctctcttccataagcctccaaagtgtggcacagaaatgacccaggttagctatgtaaaaactagttgctcttctctcctgcctcagactgcactcttaagtaaaacccagtctgttcctccttaggagtaaaagtcgccaggcagcaagtcagacaatgctactgtcagggcatgaggacacagaggtggcagctttccaacaagactggaatgtcactgtaatttactaagtgctgcacttggtctggtctacaagtcaatccgatgactacagtctcatgttgacactgcagtgtctcatgactttggcagtccatgttctgaatgccagccagtgaaagctctggggccgataaagacatagcctaggctctgggttcagatagggtagggttaaacagagcttaatggtaatttattcagctagggtcttaggggcatcatcacaatgctctcaatttcttcatctatggattagaaagaaaaatggtgctttctctcaaaacatttttcactagtattaaacaaaattttatatagatatatgcagtgtgttgcattagtaagttcttgagagttgtatagatttaagctataaaactaagctgctcagagattcactaattatgctgtctatagccaaatatgaaaatgtctttcaagagccatcactatgacagagtatatctaaatctactcagaaaatatatatagcaagttaaaaccgactttaacttcaaaataattttaactctctaaactggtaaaacaaaacaacctacagaaatgtttgtctcttttaaaaatgttcatacctgcagatgagggggaaaagagagttccgctccaggaactgtcactgcggactggaagttagcaggactaatcgatgctgttggaggcatgttaggaaccaaaattagacttcgaaattcattatgtcttctctgtatgtcctttagtcgtttttgaagccttgtatattcttcaaatggaacattttgtcttaaaaagaaaaaaaaacatttctgttctttagtagttataccctaaagaaaaccagaatataatttttaagtaggagaaagattcctaaactgtaactccactaactgaaaatgtatgtaaaaagatcaacagaaatggcctttgtaccccctctcccacaccgctgtgcctggagctgatgtggactctctctggagcccaggatgctttacacctcaagtggggattattaggtgttcaagcacatccagctactatgtatgtttttggttttctgttctttgtttttgtttttaagagtctcactagcccttaatggcctggaactctctgtttcaactaggctgaactagtatcacaacgctctacttgtctcagccaatcacttgtcttggcctccacagtactgggactaaaggcatgtgccaccacgattgaccctatatattaacactaggtaattattagcactgcaagctaccaactcatagttttatttgtcaattaatcaaagattaaaaataccttgggaaaaacttcagtacttttcatttctactctcctatgaatgctgaaagtaaaagaggactcttgactacaaaaacctaaaagttgaattaagccttatgaaattctttttttacatgaaatatagtcaaatttaaaatcataagtttttatatttgaatttacccaattttgggtgtaaatgaatattgatcaataaatatagtatttggcctctggcactctagtaactcctaaaaactcttgtaatgagctaactcctgaccagggaccctacagagctttagaaggagcaggtcatcagaaagagccccaggttcaatgagcaactcttaacaaattaatagatctgaagcatggagtcattggaaccccaatttatagcctgtgaatgagaggtacaggtcatgacctggctttatgactgccatctgaagtggaagcagtctcgtacgattgagccctcatcctgtgtcagtatcagaactgaattataggacacctggacagtgtccattagagaatttttgtcctagtacacagtagaaaaggttcatcaatgttactatcagcaacctaactgaatcaatcttcttagctctaggaacactaatggcggtgacaactagctgacactaaagttctgaactatgccactgctataactttgctgccttaacaagaactcataccacccctaatcacaaaactgtaccgaagccagtgagtgtccttttttactatcacacaataccacaaataccttatacgagatagagacttttggcttgaacattcaagtagacagaagagtaaaggtaaaaaggaaactttgtaaatgttaattttggggagggggttgtctgtgcaccttgctatacacagcaggctgagctcacactcacagatgtctacttgtctcttcctgcagagtgctggccctgagtacacgggttaaataagtacagtgagctcagaaacaaagtgctggagctggagaggtggctgagcagcaaagggcactggctgcttttccaaaggaccagtgctcactgcacagcacccacaaggtagctcacaacagcctgcagccccagttccagggggcctcacacccttctctgactactgcaggtacctgctgtcatgtggtacacagagactcatgtaagcacagagacattcaatcacagtggataaataaaaacacagtaaacagaaacaaagtgctacacaacaataggggcacatatatacatacatattacctatttagcacctggttttctgtttctagttcttctttctttgcctccaagacttctactttctcctgtagtctcttcaatttgttctcatgaagagattttctctaaaaacaacaacaacaaaaaagattagtatgaaaaagtacgctgatacataatttcctatttgaaaaaaagatggtggatacttaaggcactttttaaaatttagagattaatattttcagtaactatcagggacagatattagtatatggcttgtactgaaactgcaaagccaagaaactcagatcaacctcacctcctcagtgtaacagaaagtatcattatgaatgccttccagaaaactagcaccaataaccaactcactgcagcaagctaaagaaaacggagggaggcagactttactgagtatgcctgccatctgcaaaggaaagaacaagctcttcatagcctggtgatacacagttagagaacctggaacacaacttaaaattaaaaacctggttgcaaccaataaattcctaccaaagcacaaagggaatggatggaaatgctaagataaaatacaagcctatcttagtttaaaagtatgtctttctaatcattaagagaaaaaatttaactttataatacataaagaaaaaaactgtaaaagtgaatgctgtatgacttttttttttaattaatggaaatgtcaaagtatacaaaaggactacatgaagtaaggcatttctttcagttcttataagcaagttttaaaaatagaaagatacccatcatgttggagctaatttagcagctgcagaccccttaaatgtgtttctgactgtttactgacgcatagcaagtttagaaagcacacagactgtaaatgcaaagctcaatgaaaatgcacaaaccaagtgtaggtcaagaacactgtaggacagcgctcagaacactccttcttgtcaggacccccagcattgaaccaactaatttatttccaaagctacggtcctgccaccatttgaatctcatttcatgaattgaaaaataagagtacatccttttgcagatgatgttttctttcactcaacatgcttacgattgatcatgttatttcctcattcactaccacatggtgttcttcacttctgactactacgtttattacattcacccagtccactgctaggggtcacataggtacttctacttgtgacagaaccagaggttcatagtggtgttccagcagtaactccattgtgggcgttacttagcctttaacatcaaacggcatgcccaaagacctccttgtgctcctcctgggatgtgtaccctggccaagttaccactcttcttccttaatgactatacccatttacctgtgacctgaggaacatggggtccattcatctattgatctcacctgtataaaagaaactatataacatatagcctttgcaacacttttttctaagcattttatctatgtatagaagcaatgctattgaacattacagtagtataatttgccattgttatactgtcacccagggcacaaatgtactattattttaactatattcgtattgataaaaatcgcaattgtttccagtttgaaattctagtactagcaaactttctgaacacacgtttggtaaatatactcattctcaacctgccactttttaaaaatggttctatcaattccacacccaccagtctgatagaattcaggctggtctacatccttgccaatatgcagtatagtcagtcacttacattctagccattctagtagaatgtattagagtcttattgaaaacgctggtaacgttcctgatccttatctaaagacattaaatatcttaccctatcagccatctgtattttttagggacactgtgtgtacatatgttagtgcttggtctagttttgctcaatagaaaaagaaaaaaaatgtttttcgagtaatctgattcttatggattggaaggacttctttaaataaacaggttatgaacccttttgtagccgaatatattagattcatgtctcttggggaattttctttttctcttaaaaatttttatgtatatgtgtgctttgactgcatgtatatttgtgcaccatgtagacgactgagaggctgacagaagccagaatagggtgtggcattctttaggactgtcatgtgggtgctgggaatggaacctaggccctctctctggaaaagcacccagtactcttttaacaatggagtaatctctctccagccctatcatggaattttctctttaaaacaaacaaacaaacaaaattacacacatactttcaagaaaaagttctttatttttaggaaattttacttttattttcaaactgtcactatcttttatagttagtactttctatgcccctatttaagaaacatttatttattgaacctcctctggttttctcccaaggtctttgtttgcttatttgtttaaatgctggctgtttgcttccacctttcccgtgtgcagatgcgagtccttttccacccttgcagtgctgagggaaggcgcactgtctgacaggctgccctgaaaagtcttctctactgagatgcagctgtggaaacctttgtaccaagctcttgcttgcttcacttttcaacattggttattctactccttccaaaactgtgtaagctttatagcttattttttatttttacaaagaaatatccaaagattttgattatatttagttgtagatctacttgggaagaactacctaaaaaaatgaatttcctaacgctcaagcatgatgcagtttgcctctttaatcattcttttgttttctttattagatattttccttatttacatttcaaatgttatgccctttcctagttcccctccgaaaatcccttatcctctccccccaacccccctgctccccaacccacacactcctgcttcctagcccaggcattcccctatactggggcatagaaccttcacaggaccacgggcctctcctcccattgatgactgactaggccatcctctgctacatatgcagctagagacataagtccctccatgtgttttctttgattagtcattaatcattctttaaatttttctgagcagtttgtagttttaaatattgatgttttatatatctactagagtcattcctatatacttaaaattgaatgttattgtaaatgacacctaaatattttactttccaattgtgcataataaagataactggtttgctgcttgacattttagctatcaacttaaaaaatttacagattttaggttgggtgtggtggcacatttttaatcccagcacttaggaggcagaggctagtagatttctgtgagtgagagagcaaccagggatacaggacaaaactgtctcaaaaaataaatcaagttaataaataaataccccatacctatttttaatactgctacatttgtttatatttcatgcataatgatgcaatttatgagtgacaatcttctcttcaaccatcatacccattttttttctccattaaattagctagaacctccttaaaaaaaatgaacaaaatgttcatagtggaagaatttggcttgttcctgagcttatgtggaggaaacatttaatatttaatcagtaagtgtattagctagaggattttgtagtaaccgatgatcaaattgaaaatcctccctactatgaatttggtaatagcttctagtctgaaaggatttctggtttcttcaacagttatctacgtccattaagatggacatcacagtttgccttctttgttgctcgaccactcagctatactggacaattttgcatgctaaaccatctttagtcttaaaatgaaccttacttacatgctcaagacacattattttaatatatagtaatattctttgctaatatttccaattttgtacctgtttaaatgatgttaatttctctttgactgtagtagatgtgaatctcataaaatatatgaagatgctctacttttctattacctgggaaaattaaaactaatattatttcttccttaattatttagaaggatttaccagagaagccgaggaggaattttctttgtggaaggctttaattaaagatctcatttctctatccttaagactcttcaggtttcctaattactctcctacctgtttcattaagatgctcttcaaggaatgtattcctttcatttaaatatgtaatcagcacagttatttttatattcttttttattttactatctatacaatatgtagtagtaactacttttccatcagtgataacatttctctttgtctaattgatcctttgaggtctccgagaattaccaatcttttttaaatctgtacctgaggctgcttggatcccttctggagcatgtttatattgttatttctcttgttgttgtttttttttttccatgttaatttcttatgcattcctcctcttgcagttttgtgcatttatttacttgtgtggggaaggtatgggagtgtcacatggggcagttggaggacaaccatgagttggttcttccagggactaagatcaggttgtcaggtgtggcagcaggcactttacccactgaaccatctcaccagccctgttattgttatttctgttaactatttcttacagaactttaaacttccaagaaaactgaacaaaccagtgagcagtttctccggctgcctcatctactccactggcattattacagcgtacactgctaaggtgcattcatcttaactgatcagccatcatgagtgcattactgtacctaacgtgtacgctgcactagggctcattcttgttcccacgagtttgcctcaaatgtaagtcacatgttctgctcttagagcaaaagcaccacacctcagtgctctccctagcagtcttcatccatcttcaaacctagcaagcactgacctttcattcgctccatagtccggcattactaagttccacttagactcctatctatcagcaagacaagcacactttctgtggctttgtgtgggttgtcaactcatttctaactgtgataaaaactgcataagtgtcccacagtttgtgcatttacctactaacagataccttgactgttttaaagtactagcataaagctactctgtgtttcaattcttcataaagacgaatnnnnnnnnnnnnnnnnnnnnaattgatttgagtaaattcctcgggatgtgataaacgggccgtagatagggtaaagagtttatatagcattgcataaaacagagtgacatgtcaggtggtggcacattctgcattcccaccagcagtgaaggaaagagttcctgaggctctatgtctccactagtaattggtagtgtattaaattttgacctctctgggtatatagtgttatctctatcttgtatttatgtagacttgtgcattacatataaaaatttgaagaaatagtttccaacccatggttaatgtttttttttcccttaacatttgtttctggtaggcatctaggaacattagccatgtgtataagtttaattcatttttaaggactgagttctgaagctctgcttcaatagttacagacttgttttttcagtttagccatgtccaggggtcaatctgtagatcccaatccaaagcactagaggatttacctgcactcctgttttgcagcacagtctggactccaattattgctttgcaagcttatgaggctgtcaaaaccttttcaagttcttagcctcccagctctctctgccccatccccctctagaaactccacagcacgtcactgttctcagtgcctggttagctctctgagaccttcaaggagatagtttatactgttcttccaggtgttgcatggtgtcttaagtcttgctcaaactgtttctaacaaagtacttgaaattttgggtactttatgaataacaga

SEQ ID NO: 713 - DNA, 7314 bp, Mus musculus
cccgcgagcgcccgcgccgcacagaggaactctccggcgaaggcggacgaggaggaagcgtctccggagcgcgcagggcttgccgccgcggcacaggctgccggagcgagcccgccgcgcgccgtcctccctgcactccttcccggccgagccgcggggatggggcggccgcgggagcccgagcgcgcgcaggagccgccgccgccgccaccgccgcccgcgtctccgtcgccgcgcgcctgagctgcccgagctgccgcgcgccctgcccgggggcggcccccctagccccatggaggtctcccggaggaagacgccgccgcgccccccgtaccccgccgcaccgttgcccctgatcgcctatctgctggcgctggcagcgcccgcccggggcgcggacgagccggtgtggcgatctgagcaagccatcggagccatcgcggcgagccgggcggacggcgtgttcgtggcgagcggcagctgcctggaccagctggactacagcctgaagaacaggctctctcgcctataccgggaccaagcgggcaactgcacggagcccgtctcgttggcgccccccgcgcggccccggcccgggagcagcttcagcaagctactgctgccctaccgcgagggggcgaccggcctcgaggggctgctgctcaccggctggaccttcgaccggggcgcctgcgaggtgcggcccctgggcaacctgaaccgcagctccctgcgcaacggcaccgaggtggtgtcatgtcacccgcagggttcgacggctggtgtggtgtaccgcgcgagtggcaccgacctctggtacctggcggtggccgccacctatgtgctgccggagccggagaccgcgaaccgctgcaaccccgcagcatccgatcgcgacacggctatcgcgctcaagaacacggaggggcgcagtctggccacgcaggagctgggccgcctgaaactgcgcggtagtgcgggcagcctgcacttcgtggacgcctttctctggaacggcagtgtctacttcccctactatccctacaactacacgagtggcgctgccaccggctggcccagcatggcgcgcatcgcgcagagcacagaggtgctgttccagggccaggctgccctcgactgcgaccacggccaccctgagggccgccgcctactgctttcctccagcctggtggaggctgtggacatctgggccggcgtgttcagcgcggccactggagagggccaggagaggcgctcccccgccaccacggctctctgcctcttcaggatgagtgagatccaggcgcacgccaggagctgcagctgggactttcaagcgactgagcacaactgcaaagaaggggatcggcctgaacgggtccagccaattgcatcgtctacactgatccactctgacctgacgtctgtttatggcaccgtggtgatgaacaggactgttctgttcttggggaccggagatggccagttactgaaggttgttcttggtgagaatttgacttcaaactgtccagaggttatttatgaaattaaagaagaaacgcctgtgttctacaagctcgttcctcatcccatgaagaacatctacatctacctaacagctgggaaggaggtgagaagaattcctgttgcaaactgcagtaaacggaaatcctgttcagagtgcttagcagcggcagacccccactgtggctggtgcctcccgttacaaaggtgcacttttcaaggggattgcacacatgctgggagctttgaaaactggctggatatttcatcaggacctaaaaaatgcccgaaaattcagatacttcgaagcctccgagagagaaccacagtgaccattgtgggaagcatctccgcaagacactcggagtgcgtggtgaagaacgcagacacgggcaagctgctctgccaggggagaagccaactgaactggacctgtgcctgcaatatccccagcagacccagctataatgtcttagttgtcaatgcgaccttctcctttccgtcttggaacttatcagaaagattcaacttcaccaactgtgcgtcattaaaagaatgcccggcgtgtatcagaagcggctgtgcttggtgtaaacgggacaagaaatgcatccaccccttcaccccctgcgaaccatcagactatgagaggaatcaggagctctgtcaagttgctgtggagaagtcgcccaaggactcaggaggaggaagagtcaaggagagcaagagaaacagaactgacggggctgtgcaggtcttctacattaaggccattgagccacaaaaaatatcaaccttagggaaaagcaatgtgattgttactggagcaaacttcacccaggcgtcaaatatcaccatgatcctgcgaggaaccagtacctgcgagagggatgtgatccgggttagccatgtgctaaatgacacgcatatgaaattctcacttccatcaagccgcaaagaaatgaaagacgtttgcatccagtttgacggtgggacctgctcgtctgcaggggctctgtcctacattgctctgccacattgttccctgatagttcctgccaccacctggatcagcggtgggcaaaacataaccatcatgggcagaaattttgacgtcatcgacaacctcatcatttcacacgagctgaagggaaacgcaaatgtgaacataaatgtctctgaatactgcgcagcaactttctgcaggtttctagctcctaatttaaagagctccaaagtacgtacaaacgtggccgtgaagctgagggtccaagacacctacttggactgtggaacgctgcaatacctcgaggaccccagatttacagggtaccgagtggagtcagagatgatacagattggaaaagaaaatgacaatttcaacatttccaaggatgacattgatattactctcttccatggggaaaataaacaatttaattgcagttttgaaaatattactagaaaccaggatctcacaaccatcctttgcaagatcaagagtatcaagaatgcaaacaccatcgctagctcctctaaaaaagtccgcgtcaagctgggaaacctggaactctatgtggaacaggaatcagttccttccacgtggtattttctaatcgcgcttccaatcttgctggccattgtcatcgttgtggctgtggtggtgacgaggtacaaatccaaggagctcagtcgaaagcagagccaacagctggagctgctggagagcgaactccggaaggagatccgcgacggctttgccgagctccagatggataagttggatgtggttgatagctttggaacagtacccttccttgactacaaacatttcgctctgagaactttcttccctgagtcaggtggcttcacgcacatcttcactgaagatatgcacaacagagacgccaatgacaagaacgagagcctcacagccttggatgccctcatatgtaataaaagcttcctggttaccgtcatccataccctggagaagcagaagaacttctcagtaaaggacaggtgtctcttcgcctccttcctaaccattgctctgcaaaccaaactggtctacctgaccagcatcctggaggtgctgaccagggacctgatggagcagtgcagtaatatgcaaccaaagctgatgctgaggcgcacggagtctgtggtggagaagctcctgacgaactggatgtctgtctgtctctccggtttcctccgggagactgttggagagccattctatttgctggtgacgaccctgaaccagaaaataaacaagggtcccgtggacgtgatcacctgcaaagcgctgtacaccctgaacgaagactggctactctggcaggtccccgaattcaacactgtggcattaaatgtcgtctttgaaaaaatcccggaaaacgagagtgcagatgtctgccggaatatttcagtcaacgttcttgactgcgataccataggccaagccaaagaaaaggttttccaagccttcctaagcaaaaatggttctccatacggactccagctcaatgagattggtcttgagcttcaggtgggaacacggcagaaagaactcctggacattgacagttcctctgtgattcttgaagatggaataaccaagctaaacaccattggccactatgagatatcaaatggatccactataaaagtctttaagaagatagcaaattttacttcagatgtggagtactcagatgaccactgccacttgattctgccagattcagaagcattccaagtagttcaagggaagagacatcgagggaaacacaagttcaaagtaaaagaaatgtatctgaccaagctgctgtcgaccaaggtggcaattcactctgtgcttgagaaactcttccgaagcatttggagtttgcccaatagcagggccccatttgctataaaatacttctttgactttctggatgcccaagctgaaaacaaaaaaatcacagaccctgatgttgtacacatctggaaaacaaacagcctccctcttcgattctgggtaaacatcctgaagaaccctcagtttgtctttgacattaagaagacaccacacatagacagctgtttgtcagtgattgcccaagcattcatggatgccttttctctcacagaacagcaactggggaaggaagcaccaaccaataaacttctctatgccaaggatataccaacctacaaagaggaagtgaagtcttactacaaagcaatcagggatttgcctccattgtcatctttagaaatggaagaattcttaactcaggaatctaagaaacatgaaaatgaatttaatgaagaagtggccttgacagaaatctacaaatacatcgtaaagtattttgatgagattctaaataaactagaaagagaacgagggctggaagaagctcagaaacaactcttgcatgtaaaagtcttatttgatgaaaagaagaaatgcaagtggatgtaagcaccctggggcctggctttatttgacaaagttcttcagacagcttgggagcaaactggctgcttgagctactctttgtcgttaatttcttaagtttgcacatgggttccacttcgagcactgtcctttaggagaccaaggcacatgcacagcttttagaaagcgttatcaaccactgtgcctgtgggtatatcgtgggaacctttctgtaaatagagctgaagtggttgttgcaaacagcctccttgtttacagagaatacagggccagtaagcaagtgtcagtattgtaactacagtctccacttaagcacaatgatatctaagtggttttgttggaaaactacagctatgtagtacttgtgactacactgtacttctgcagaagaaaggggatactaacaaagctcagagtgtggaaggagtcctttggaaacccggagggggtgttagggcaaccctgagggtctgcggcattcctcctctttccccagtagttcttggaaaggctgaaggcagaatttggtagtgtgtacacttagcattcgtgagtgtgtgtgtttaaaccaaaaactaacagtgttgcaacattgttgaaagggctcgtgtttttcagtggttgccagccgggctcctcagcccacctccatctcatcaacgcagctctaaagcaaggagagtgggtgggtctcactgaaatgcaacagcagttttcccagactctgtcctacggtgtgtctcttttttatcttttcatgtatctggtagtggacatgttgggtattgtaagaaaaagagttcatgactttacttctgtttgatcagaactgtctgtggatgtgtaagtcactcctgtaatcttacatttctatgctagtgtctccttgctttagatttctggtgaaccctgtggttataaatacttgtgtgtgattaaaataaaagatacattttacatttcatcaaattgttgttcacattggagtattatatataaatatatatatttgaggcccaaggcctggaaaatattagtacaacttggtatcttagtcttactatgtactttttgaaagtattccttacaggagaaagatttaaaaatactcattttattcgtgcctctttttttttttttcaaagaatttcctatcaagttatactgtagtcttttttattgctgatttttttattcccaaatttttgctgctcgtgaccaattttaataccactgtgctttccttctattaaacagaagtaaaaagtgtcacctgacggccctctcacttaccttgtggcaggcacccctacccttggggttccaaacccccagtttaggaaggacttttctttcaatcagccaatcaaaccttgagcacacattcctcaaaaccatttaccagcactgcctggcccatctagactgcaatgtcctggtaaatggcagtcctttctcttccttactatctgacacctcaacagtgcagtggctgccctgacagacgccctcccaatcttgtttcttgtgactactgtctgtccaatggacacatctcaaaactactaccaaatagtctatttctaagtagaaaggtgagaggtctggtccccatttaaagctgctaccgtctttaaagaggtgaaggcattcctaagagaaaagttggaggagacttgagagccaagggtaggagaattgcccaacaaaccttcccttctctggggaacagaaacgcaaaggctgagccacagctttagctgtgttacaaatgctacaccagggggtccctgtccagctctctgacatgagtcctgtgtgagccttaccgcctctttcaggagttaggaactttgggcaagtcacttacctctttgtgcctcaatttctgtatactatttctaacctacctcactgaggtggtgtgaagattcactaatgtatgtagtgtgtttgtcaatcctccagtggaaagcactatctagatcacactttggatcccattagccaaatgcacagaatgtccaaattagatgtgtgctgaagacaatcagtcactgggcctctattcaacaactaaagaagcaaatgacaaacagtatctagtttcaagtttctttgcatatttttggtgcaaaacaattaatttataaacttttttttctaacactagtgtctaaagcagcacttaaaaattacttctgttatcttttctgtattaggatttaaagtctatttcttactgtatacctgactgaagttgttcttggagatgaatgttttaaatgtctatatccaaaaataaacattttgat

SEQ ID NO: 714 - protein, 1553 aa, Mus musculus
MEVSRRKTPPRPPYPAAPLPLIAYLLAAPRADEPVWRSEQAIGAIAASRADGVFVASGSCLDQLDYSLKNRLSRLYRDQAGNCTEPVSLAPPARPRPGSSFSKLLLPYREGATGLEGLLLTGWTFDRGACEVRPLGNLNRSSLRNGTEVVSCHPQGSTAGVVYRASGTDLWYLAVAATYVLPEPETANRCNPAASDRDTAIALKNTEGRSLATQELGRLKLRGSAGSLHFVDAFLWNGSVYFPYYPYNYTSGAATGWPSMARIAQSTEVLFQGQAALDCDHGHPEGRRLLLSSSLVEAVDIWAGVFSAATGEGQERRSPATTALCLFRMSEIQAHARSCSWDFQATEHNCKEGDRPERVQPIASSTLIHSDLTSVYGTVVMNRTVLFLGTGDGQLLKVVLGENLTSNCPEVIYEIKEETPVFYKLVPHPMKNIYIYLTAGKEVRRIPVANCSKRKSCSECLAAADPHCGWCLPLQRCTFQGDCTHAGSFENWLDISSGPKKCPKIQILRSLRERTTVTIVGSISARHSECVVKNADTGKLLCQGRSQLNWTCACNIPSRPSYNVLVVNATFSFPSWNLSFNFTNCASLKECPACIRSGCAWCKRDKKCIHPFTPCEPSDYERNQELCQVAVEKSPKDSGGGRVKESKRNRTDGAVQVFYIKAIEPQKISTLGKSNVIVTGANFTQNITMILRGTSTCERDVIRVSHVLNDTHMKFSLPSSRKEMKDVCIQFDGGTCSSAGALSYIALPHCSLIVPATTWISGGQNITIMGRNFDVIDNLIISHELKGNANVNINVSEYCAATFCRFLAPNLKSSKVRTNVAVKLRVQDTYLDCGTLQYLEDPRFTGYRVESEMIQIGKENDNFNISKDDIDITLFHGENKQFNCSFENITRNQDLTTILCKIKSIKNANTIASSSKKVRVKLGNLELYVEQESVPSTWYFLIALPILLAIVIVVAVVVTRYKSKELSRKQSQQLELLESELRKEIRDGFAELQMDKLDVVDSFGTVPFLDYKHFALRTFFPESGGFTHIFTEDMHNRDANDKNESLTALDALICNKSFLVTVIHTLEKQKNFSVKDRCLFASFLTIALQTKLVYLTSIVLTRDLMEQCSNMQPKLMLRRTESVVEKLLTNWMSVCLSGFLRETVGEPFYLLVTTLNQKINKGPVDVITCKALYTLNEDWLLWQVPEFNTVNVVFEKIPENESADVCRNISVNVLDCDTIGQAKEKVFQAFLSKNGSPYGLQLNEIGLELQVGTRQKELLDIDSSSVIDGITKLNTIGHYEISNGSTIKVFKKIANFTSDVEYSDDHCHLILPDSEAFQVVQGKRHRGKHKFKVKEMYLTKLLSTKVAIHSVLEKLFRSIWSLPNSRAPFAIKYFFDFLDAQAENKKITDPDVVHIWKTNSLPLRFWVNILKNPQFVFDIKKTPHIDSCLSVIAQAFMDAFSLTEQQLGKEAPTNKLLYAKDIPTYKEEVKSYYKAIRDLPPLSSLEMEEFLTQESKKHENEFNEEVTEIYKYIVKYFDEILNKLERERGLEEAQKQLLHVKVLFDEKKKCKWM

SEQ ID NO: 715 - DNA, 177930 bp, Homo sapiens
  misc_feature (1)...(177930): n = A,T,C or G
ggacttccagcatccagatctgtgaggaaatacactgccacccagtctgtgatactttgttatggcagtcctagcaaactcctaatactaatagtgctcctaacacagcactagagtcctgataataataatggtaatcataataataacgttttttatttatggagcgacttcctgtgtgccaggcattgtgctaaatgctttacacatattatctcatttaatacgcatgaaaatcccatgtgatggatgcaatttttccaacccacgatgaggatgctgagggtcagagagcccaagcctacgtagttattgagtggtgggactgggtctggaacctaggcctgactgggatcactgctggcctacagtgtctttgtacaaagaaaaaggtgccacttcctttgggaacacccagccccaagccagggtgcaaggtttggtaaacagaagacaggctgggttttaattcctctttcctccttggctgggtgcccttgtgcaaacctaagcctctcagggtggcccacactgaggcccaagctcttaatcattacaccggactgctcagtgggccagggtggctgggggtaacaccattgccaccgtcgaggtaggatcagttgggcacgtaagggactgtgagtgctggcaaggcaaaccttacctccctcatggctgggaatgagatacgtgggagcccaggtccatgagttctgggacccatgtgggtgggcttccaacggtcctacaggacaacgacaaatggcccttgacttagggcaattctgcttatttctaattggccccagaacagttctgtgtccagtcctcagtcagcaagaaatccagtttgccaggatcgtgcccctaggattacacagctgtcctttcgccattatccccatgcctcctcctcctcccaccaaatcaaagagaatgagaaatgcatcttcgaccatttggctataactataagtgtgcctgtcctcacaattaaagctcctgaaagttccaaatttgctgctttcacggtgggaaaaaaaggcctccgacagcgtaaatatttaatcaccattaagaatgtccaataaatgaggggaatcaggtttcaaattgactggttcagatgattaaagtacagaagtcatagcagggtaaaaataaagtaccctctaaaaaagtagcatcttgtgggcaggggcaagatggaagatagcacgttgggacctctcaaggccgggccgggcactgcactctccaggcagggccgggcgagtgcggcaaccaccgtcactctccaaaggcttccgtgccccctggggcagctgagcggggtaatgccctccgtgatggagagcgcgtgtcccacagccgggccaagacggtgcccaaccgcagatagccccactctgaggatgacagcagcgaggaggagcactcgcacgacagcatggtccgcgttggaaccaattaccaggccataattccggagtgcaagcctgagagcctcgcacgctacagcaacaagaagctgaagggggtgctggtgtggtcacccaaccactgtgtgtcagatgccaaacttgacaagtatattgtgatggccacggagaagcatggctacaacattgagcagacgctgggcatgctctggaataagcaccatgtggagaagtcgctggctgacctggccaacttcaccccattccctgaggagtggacagtagaggacaaggtgctgttggaacaggcctttggcttccacgacaagtgtggatccaacagacgctgcccgacaagttgatttccagcctggtgaaatatcactactcttggaagaaaacccacagccgaactagcatgacggacagacaggcccggcggctgaggggctgcaaggacaaagaagacagtgatgagttcgaagagagtcgaggaggcctgagtgaaggagagcccgatgctggacacccgaagagagaggtacagagcataaagcagaggaacagcagcctgcgccaagccctggagggcgccattgatccactccgcgctctggaggccaacactaagttcaactcctgctggaccacagaggagcagcttttggctgcctaagccatccggaggtatggcagactttggggctattgcagaggtgattgggaacaagactctgacccaggtgaagaccttctttgtgagctattggcactgcttcaatctggaggaggtgctgcaggaatgggaggctgagcaggatggggcccgtggagccacagtccccgtggaggaggctaggagaggggctcccttgctagccccagcccaagaagaagatcatgaggtccagattacatcgatctccatgtctgtgtcccgatcggtgcccccctgcaccacccccgttccacctcccacctccctgccctaggtgccccctgctgctgaggccacctttgcccacggctcccactctgctctgacagccacccacagtgcagcagggccgcttcctccagccctggttggcccccaaccagcgcccaccacctctcatcctccccgctctggctgcctgtcctggccctccgcccctacccaccctgattggagcccccagtgccctcactctgaatcctgaggtcctccaccaaccacaggctccaggacctctttgctggccatccccaggcatctctggtgtcactgaggacggaaggggctagggctcttgccaggtctttccaagacccagagctgccgacagcccagcctggacctgtgggttctgcatgtgttcctggcagctgggcctgtctcttggggccatggcccgggctcaggggcctttgagctggactgagggcactttcgcttccttgctgggactggaatggctgcctcctagttggctggggcttggtctctgggccctgccctttgtgtgtcgggggtagggaccttagcgtgggggtgggacaggacagttgggtgtgctggctgttctcattcctcttcccttcttttagcaatcagtcttgggtgaggtgggaagggaggctgcagggggaggtggcagaggggccttacagcagcagaggctggaagggaagttctgtcttcaggggccagctgggaaacactaaggagctgagggtgcccaccaggcccaccttccagaagcttggagaaatgtgggttgggaacttatgcagacatggatttacttttcaacatgttttaaaagttaaaaaagaaaaaccttctaaaaaaaaaagtagcatctttagagggttcctgtctctactacataggtttccttgagtataaaggaaccaaaaacatccaagttatctcttcattattagtagggggcgacatagggtgaggtctggagatgaggaagtatagcaatctcttaataatcctgctttggtaataatgaatatcaatggaatttctcaactttattgaagggacagctggagttcagacttaaggagaaatgtcttaaaaggaaaaagcggcatgcttggttttgtatcttgtttgaaaatatatttcaaacgttcagcagaattttagagatcataaccaccctctgcccccaccaccttctgaacccttagtccccagtagttctgatttacttttaagattcttttagttttatgttttaactgaaaaaaaaaaaaatcctgcccagccaggtttccatctgtctgtatcaccgggttgaatttagtgtaggaaagcctgtgcaaagggaataaaaatgtagctttttttccattgccagattcaggggaaccaaccatttggaaacaaaggagttccattttgactagcagcctttctgctttccatcagtggacaaagtgaatgtacaggtttaaacatcatttggggtcacctctagatccatgtttggaggtagattggtttgttagttatgattctggcaggaaacaggtgacacatgcaaacagatacattaattgagggaccatggccgagccatgccaggatgaagggagaccagcagaggctagccacagcgacaaccatggaatcccacaggcctgaggaggagggtgagggagtggttactgggtccacgaaaggctgtggctacagtgtagctgtgagagaggacagcccacaggagctgtggccttgtagagggacacagccatggccaatgcatagatcagcagagagggagctgggagaataaatattcaaacttcaccctagctgtccacccctagatctctggctggggcttcccattggctgaatccaaccagaagccaaaaggcaagggtgatgtccataaatgtcaaacttctgggtctcaagcaaaagggggagcagtggggaaatggtctgcagggagaagaagagactattcaacacagacggggaagaagaactaaataggaaggactagggaaggggtgaaagagattgcggtgatggtttcaagggtgtagacttatctccaagcacaacatgttgtatataataaataggtatggatttttgtatgacagtcatacttcaatgaaggctttgtaaaaaaaaaaaaaaataggggcaggagagcgaggcaaacactcggtcttccatgaactttgcatttgggattctgtgcgtggggatgagtgcctgagagatgctgtttggactgccatattcccagggcttccccaggatgggtgatgagtggggctgcccccaccctggggccatacgccaaactgcccgaccgcaagagcccatgctcagagctgatattggttgcttcctcccgaccttggtggggctattttctagggagtggcaaggacataagaatgagaagccacaccagcttggtggagagcactagagggctcactgcgaagtccagcaactttattgtcagctcagagcatctccccaccagaatctcaaggaagcggaagtacaagtggctgtgaagttatctgcgtgtttatcttatcttctgctattcatttcaagagttggagttattattaataagaaggcctggtttctggcagctcttctcttagaatgggtttatgccaagctgccagttatcagaggattcagagcctaggattatgctgacagcgagtctcagagctgtgatgggagggcaaagacacgggaaacaacgttgtattaaagaggaatcagcgttttgtgtctagtccttgatgcccttttggcttcctatttccgaagaacagcaaggaaaatacaaggagagacagactggaatcctgtgaatatcagagaaaagcttgattttcaagagactgctcaagttacagagattccccaaatctgaagaagtaattaactgatgagttcgcatacttcatgcagggtgaactccagccggtctagaaaaacactgtgatggttgatgatttaccatactttgctttcaaccagtaattgtctcagattcttaaccactgatggttttggtgaatgttttggagaaaaggctcgagagaaacttcatgacactaaacatactctctgagaagtgtggtgctagaatgctaaggtgatgtcctagacttcgcagtctcttaaacatatctgacattatattatgctatggcatgctatgctatgctatgctatgctatgctatgctatgctatgctatgctatgctatgctatgctatgttatgtctttttaggcaatagctcatccctccctaaagcagagtgaatgctcttatttagcttaaagacagtcattggactttgagtaaagagtcattttcttgtacgttccactccaccctccagtgtacatttgcactctgctggcgaatgaccatgagctattaaatcatgacatagaaaaagatgacaactgtaatgttgggagtgacccccaagtcccacctactgaaggaacaccacaagccttcctcactttaaaccatggcatgggggcactatcaccaagcataagaatgcccagcaatcgtctggggccatgttgggtgggcagagaggatgaggcactgagttccttcagccacgtcttaactgtgccatgtcagagagacttttcatgttgattgaactgtgtccaactcatctctcagcaccaatgcgaacttattaaacagctcttcctctaatcttttttcaaccatctactcatcagcagactagaaagaagactggctcatttctttttcctgtcagccaccaaaagggcctgggagctttgataagggcctcgatgtggaagaccacatagatatcagcaaaactgtggaggaagaagtggtctgcttaaaacctaagaggacaatacaggtactattccacccactgggtggtatttccaaattctgcacagggggttgtagctatgtagatgaggcttagagagaattcactgaccaccagaacaaatattctcagttgctttcaatctctgccagccaagtcatgctacagaccactgtcagatgaaaaaaaaaaaaaaaaagaaagaaaatcagaaagaaaactgaagcaccaatgatagccatcttgtgactgtgaccaattgcctactgaacagttcttaatgtcctgggccccagcaggaaaccactgaatctataaagtcctgtccaccagaaatgagtctgattgtggatggcctggttaacccagattgccttcggtgcctgagggacttgatattttctcattatgaagactttcccatctagtgaacgctgcaaataaaactgctcagaatcggtctgaactgcctgtttccgtggtagcaggcctctgtctggaggataaatctgcaccatcttcttttttttttttttttttttgggtttcagccagttgtgttacaaggagttccgaaatgtgctataagtgacacccaacaagatgggctcggccagttggagagggaagctttgtcaccaaagggacttgcacccctgggccagacggtggtgtccaagagaaagtgatcaaagagatacagaacccgcatgcctaaatatttatttcagttgttcgtatttcccacacttttcaaatgtgaacttgtgtcctgaaggtggagctttagtacacaagaaaattgggaaggggcaaacatgtttgtacaaaatgggggtagaatcagcaaagaatgcatttatatgcttcctcgtcgcctacgtttttcatgccaaaaagttagcacagattctgatttctttcaccgtaggagtctgcatacaattaaatgggaggcaaaagaagcccactcttaagagtggggcttatggtcccagtagaatggcagggaactgtagccatcaaagccatttatacttcttgtgggtagtatttttaagatgttgtttctttttcaaaatgaagcagcaatgaactgagtagtgatcaaaatgccgcaccacagagtatgtttaatccaaatagctcccaagatggtctgtgactgattgtaccaactctacgggacttagagaaatgacttggttaccagtgaagtaaaactatctctggaatggaattgaactgttgcttctcagcacatagcgacactgccaccgctggttcacggagccagtgaaggtcactgagttctgcatcagtcacagggaaaactgtcaaaacaccagcgcataaatcccctactatgctgtggagggggtctctgagcttcggatgaggtttttaaaatattgatcttcccacttccagaggtgcaaaaattctgaaagcattccaggagggcagggagtgggggagcaaggccagatattttggagcaggtgaaacatctgacttgtcttgcctgagatgtcccgattaacaccaactgggtactttaggcctttccccttcttcctcccctctccttatggacactccaacaccatcatcacagcacaaagggcaacctcatatctcgtgggaaggcattttctgcctcctgccaggcaaagataatgttatccaattgcaaatgaaaggcttatgaatgaaaagatgaccactctgactttagtgtatgagagccactgctgaaatgataggatccttgaacttcacatctagagcagaaactcacacttctcttcttctccctccacctcacccttctttccttaagccttccagaactcctgccatatccctcagcactggggagaacttgaagcactgttggagaagtttgaaacctgcaaccttcggcaggactcagcatgggacaaaagccacctcattcctttcccttcccaaaacagcatctcgagctggggaacttggagggaaggaagaaaggggatagcagccaattgccctccctggggcctggggtctggaaatagcctgggaaggaacagagatcatttcccaacgatccatagaggtcctcagcaccctccactcctatgcaccccctggctcatctgccagactgtaagggtgctgatggtgcccgcagctgccccgggaagctgggaggcatttgtgcatcctctgggaagccccattccgagaaatcatgaacctattccccagtgggcaatgattccctgtgcttcagaaattcttggcggctgtgggggcaacccagctgttattcaccctctgggtgaggtggtgagacctcagggggtccaaaggataaaagtgggtaatgatgagacagatggagagcctcgagggaaatacggggacttgggtctaatagtagaaagcagggcgggggctggttggtgcatttaacttgaggaacttttcagtctcactacagagaatgatctctgggggattatggcaatggccacaggtggcacttaactagagccaggtatgtaagaggccctggggctagatatggattcgaatctcggctctgatatctaccagcagtagaatgccagcacgttccacaacctttctataaccattctcctggactactaagtagggatgacaataacagtcactaattaatagggctgttatgagaattatgagtcttaacccatgtggtgagttcacaagcgcacccggcacgtagtaagtgctcagtaaatgttagccccgctcattaggttagatggtgagcagaactttccaagtgctaggcttgagagcctgggactctgttgccaagggagattagagaacctttgcaaatatgggcgctccggccctggggattgtccagaacgagagtgtggcgcctgcctttctgccacctcactcatccgacccggggaaacccacaccctgtcacaggggcgccttggtccccggagtctccggctcggccatgtctcccgcgcgcctccccggggcctccctctcgccgctccacacctgtcagccgctctcgcagcagccctgtggcccgagcccggggcctcagctgcaaccccttcgcaccctggatcctcgctccgcgcgcctggcgtatccccgacccggctgctgtcgtaaacaaaaccgggcgttggagcagcaccgcgggcggacgggcgcgggagcccgctccgtgcgccgttagcgcgccccgggagccccaggcgagccaagggggcgatggtggcggccgcggcggccgcggcgggcggctgagctttgttatgaatagatgaaagaggccacctacacagtaacccaaattacgagacctccctcctccctatctcaccgaatcaagaggggaggggagatgggcgtggagggagggcgggcgggcgggcaggaggcggagggcggaggaggaagagaggatgaggaagggggccagttgcatcccactttcacaatgggaaagtgaaacgcacaagcgcacccaacctctccagccctccccgcccgcctcgctcctctccgcccgtcccctcccttcccctccgcgcctccccgcgagcgccagcgctgcacacaggaactctccggcgaaggagggcgaggaggaaacggtgccggagcgcgcagggcttgctgccgccaccgccgctgcacaggctgccggagcgagcctgccgcgcgccgccctccccgctctccttcctgggcgagctgcggggatggggcggccgcgggagcccgagcgcgcgcaggaaccgccgccgccgccgcccgcgtctccgttgccgcgcgcctgagccgccgtcgccgccgcgcgccctgcccgggggcggcccccccagccccatggaggtctcccggaggaaggcgccgccgcgccccccgcgccccgcagcgccactgcccctgctcgcctatctgctggcactggcggctcccggccggggcgcggacgagcccgtgtggcggtcggagcaagccatcggagccatcgcggcgagccaggaggacggcgtgtttgtggcgagcggcagctgcctggaccagctggactacagcctggagcacagcctctcgcgcctgtaccgggaccaagcgggcaactgcacagagccggtctcgctggcgccccccgcgcggccccggcccgggagcagcttcagcaagctgctgctgccctaccgcgagggggcggccggcctcggggggctgctgctcaccggctggaccttcgaccggggcgcctgcgaggtgcggcccctgggcaacctgagccgcaactccctgcgcaacggcaccgaggtggtgtcgtgccacccgcagggctcgacggccggcgtggtgtaccgcgcgggccggaacaaccgctggtacctggcggtggccgccacctacgtgctgcctgagccggagacggcgagccgctgcaaccccgcggcatccgaccacgacacggccatcgcgctcaaggacacggaggggcgcagcctggccacgcaggagctggggcgcctcaagctgtgcgagggcgcgggcagcctgcacttcgtggacgcctttctctggaacggcagcatctacttcccctactacccctacaactacacgagcggcgctgccaccggctggcccagcatggcgcgcatcgcgcagagcaccgaggtgctgttccagggccaggcatccctcgactgcggccacggccaccccgacggccgccgcctgctcctctcctccagcctagtggaggccctggacgtctgggcgggagtgttcagcgcggccgctggagagggccaggagcggcgctcccccaccaccacggcgctctgcctcttcagaatgagtgagatccaggcgcgcgccaagagggtcagctgggacttcaagacggccgagagccactgcgtaagtcctgcccccggggcgccgcggagagcgctgctgccggggagccgccgccgccgccgaggcagaacgagctgggggcgagcggcggggcgggggtacagccgggtgacatttaccaggtctcaggttcacaccgcgggcggccgtccgaaggctcctctcggacggtccccgagacctggagcacggcctgaggtccccaaagggagagtgtaaaaaggggggcggggagggttggagttagactcaaaactctagtggctgcatcccattgccatccttccctgtccaaacggggacgcttgtttggggctgagtctcctcgcgcagcccctctttcccattcgcttctccagacttctctgtgccccttccgtgtagtcccagcaggcgtgtgggtctgaccctcttggtcaacagttagcaacacagtgccctcggcagagaagccattgaacctaaagggctccctgccacaccccagcctttgtggccccctgtctccgccccccaccggcaacgcaagtgctgtggtctgaagagttgctagcccgctcagcgtggagaaatgccagcctgcaacagaggcttgcgctggaaccgaacccctggcgtgagccggtgcgagggggcggtgccgtggctctgctcagggtgcgctgtggtcgccagccgccgggagaggctgggcgggaggtggccttgtggtaaaagcctcatcctagaggggagtgcaagggaaagtgttgggggtgctacaggcagtttctgggctccagattgcgagactagatggcgggactcagagtcaccaccctggggctgaaccaggcaagcgatacaggtttcccctgggctcccagggcagccacagcttttatcttgagattggcatttctttgactggaaaataaagaggcagttcaagagggtccagttgatggggattatggagccattgtgcacttctccggaggccgtttcccttccaaggcggctggcacatcaactccacatatggctcctgagaggggagcctgctgggagcctcctttataactggacaaaaatcaaagcgcagaaattaacggctacaggtgttgccattgttttggtacaaaatgaatcagagaggaaggggagaagtcactgcttggaaaatgtgttgatacaggggcacgttggctcccaggtatattaatatgtgtatagaaagacagcttcccccacccccttctttctctgcaaagcacatcttaccaaatattagccctatgagccagggagaaaaaaaccaggaggtcttttgcaaggcttcttagaacggtcacttgctgctgcttctttgcctgtcaagctgtgtgctgggacacacacattaaggccttcattttgttactggtataatttttaaaaatatgtaaaaacacatatttgcctcctaaatgacttgctgttgccgtacacatataatgtaatatttgattcctgtctttattagatctttataatctaacggtttaagtttggtaaaattatcgtttcctacttctctgttgaaagacttgaaagtacccccgaaatattactttgtgtcaagctttagacacacttagtctctggggttaatgacaagccagctcagaggcccacagcaggtaatgagggtgaaagtccaagctttgccatctgacagctgtgtcgatgtgtggagccaaaacatttctcttgactgcgtctctctacctattgggtcctggaagactcagttcccttccaaacccagccagcatcttgaatgcactcaaaatccacgttttggctcaatcaggtgttcctgcttgtgccgggatggggaggggcagtggcagaggaagtcgcggagcttctgcgagagagctgccccttggaaatcaagcaaaggataaacacatgctgccaaaaatctggaactggaaaaataaataattaaaatgggtccctccacagcatttcttgctgctatttatcaagaactcccagtgtgctcagagctgtgtgttctgaaagacagggtctgtaccccctgagcttgtcagccaagttaaataatatactctggttcaaacaatagcatgtcatggctgcacaggtgggagcttggagctttgcatttttttttcatttaagtaaattccttgctgctagtatgcattgaaaagccttaatggaattgaatttcaagaggagtttgaatgaaaaagggtggtagttttgatgaaaaagctgacaattttctaacctattaaataggtagagaagatactcaattcaacaaatatttgtttgatgcctgctagtgtaagcaatgctctgtgctgggtgccactgattttgccactgaaaggacgatagcagattgcaaccttgtgtaatggggtcatgggatcagtgtgcccctggctgtcactcagaagaatgatgtcatttgattgcatttgttctgcattttattttcaggtcttgaatgtgtttttgaaaaggcatgctgaattataggtgcctaaaacaggagcaggacttgaaacactctagagggaacctcaatagattccaacagcaattcctttagagcagacacagtaattttaacagtaatccacaggctgcaaggcacaagcggctggatttgcttgccttctttctccctctcctcctagctggctcttattttccgtcttcaatcagccataggtagaaaagtgacaggactgactgggttgtattttcccactttctggttctcttatctcttgtcactgatcctcctctccttcagcttctgctaagcagtgatttacgagatgcttgtgtaatgagtgtgtactcagctgtttacacactggaccattactttttctgccttgccaccaactttgaatccactttcataactgtagcaggttaactgcagctctcaaatgtgctaaggcaaccgatttctgtagaccctctctctaataatcttctgtgatatttgtacagcacttccacatgtattatttcttttgagccccgcatcaagtctgaggttgattctatggggatgatttcattttccagatgaggaggctaaagatccgttaagcagcttgctcaagatagttaagtgccaaagccctccaccttaaatccaggtcttccaatgtctacatctctactcttcccaccaccccagggtttctcgaactttcccttgaaggtcccctaattaaattggcagcaaacaacctcccctaggatgtggggttgaggctagagggtaacctcagaaggcagtacatgcctctaatcttggcttgtgttttagaacttcatgtggtctctttcctttttttcattcttttttataacacacctgtgcttggattagtataaaaatgaatgtttttaattatgcacaagttaatcaatttgacttcctacctttctgaactctcactacccctggcacaccaacgtgatacacagaaagtgtttgtgttcgagtttgtggagtctgattgctccagacttgtttggccaccattgttgggttctggggtcactcgtggtttaaacatggcagccacccctcggtagacattgagggtagtacgttttcctgcagtattggtccacaggactctagatcattctagtttgttctctagttcattctaccctttgtagggggacataccgccttcttccacgcctacataattctaaagcctgacataatttaactgtcatgcagacaaccacagaatgctcacatgctgcccaacagagagcaacccaaggaacatgtgtggagaagtgacatcccagttccacttggcgatgcagcctattgacctcaaaatccgcagtcttcttgtgatgtttatttctcttccagcttctgttatgattttgtcaagccattttgcagtctatagactagatggtgattttaccctcatatacacatattatatgcaaaaatggattcaaaaaggacaattgccatgacagcacccacttagaaagaggggaaagcaatcatagctactatctactgaatagttattatggccaggttttgtgtgaagcaatttacatgccttattttctgttgattctcattcaccatatggggcaaggactgtagttatcatgatgattagagatgagaaaattaaggcccagagagcttctgttaggttccatagctggaaaatagcagaggatttagaacctgggtggtccagctctacgacctgagcttttagccaccttacaagtctatattaaggagccctaccctattactattaataatcatgatggtgatgatagtaaagacatccaaagcacacggcattttctatgggtcaagtagtgcttattctatacacattaactcatgaatccagagaatattgctgtcaaggaaatgggattccccacttataaataaagaaaccaaagcacgaagggttaaataattactacatgcaataatgtgtacatgtccactgccatggacagtctgtcagcatggacattaggtcctgatgtcaaccctaacctgtatggagcaagctaagcccttgcaactgctatgctaagaccagctttttgtggacacaggcataggatagcagagaatccttagttatgagctgagtttctaggtttgcattggtgaccacctgaagttctgactctggcaggattgtagtttcttaactgtgaacttctagacagtgttggtgttctgatctatacatcatctcaaagggtgttctctgttgaaccccccatacctagcatagtacccagtatgtagttgggacttcagaaatatttgttgaatgaataaatgaaggatcgtagagaatcatgttggaaatgttttctctactcagcagcaacactttctgggagtctggtcacctcatactcccttaatcattgtctttttcttaatgcctgatgtgtcagggccccttccttccttagttttaggttacatggtgtcctttactccttcacctcttcccaggtacttccattcattggaataccaggcttctggtgttgccaatctgagagttacttttgaccatggaaacctagcatggttggaacttctatggtgtaatttttgattgcctttcaactatgagaggaaagggctttatgctgtaggcagtggtccttaaagtgtggactgtggcccagcagcatgaatatcacctgggaacttgctagaaatgcacattcttggaccctacaccagacttactaaatcagaagctctggaggttggggtgggactggcaatctgtattttagcaagctctcaacgtgatttgaagtcatgcttaggtttaagaaccactattgtaagataaaacaattttccttgtgttccaactgaggcacctaggataggaacttgtcgcattttttttccccttgcattttacttagggccataaaaagtaaccaacacattttaccacctgatattccttattccctcctcactgatcaaaggcagtacctagaaagccctttaaagacttgccatttttgggcttagagtctgagtctcaaaaacctgtaagccatagtttaattagctccttcactcttgcatataacagtttatttgtatttcactcccagatgtggggggatgtctagagtcgtctattgtgctgtacgccagaaccaattccgcacaccagacattctctccaagggtccattctttacaacatcagtcctgttaccaatttctatcctagtcatgtacagttggttgcatggaataaagatctacttgagtaaggtcagataaagggatgagggatattgtggacagaaacacatggaattacatggtaatctaggaataaaagcaatgctgtgttatggttatgtgcacagtcactggaaccaggtcaattgggaccaaagctaccagttaccagttgtgggactgtagacaaattattcaacctttctgtgcctcagtttcttatctataaatagtgatcctcttggtttcataggattattgtctggattcacgagttaataagtatagaatgaatactactaactacttaactcatagtaaatgttatgtctgtgtttactatcatcaccatcattactactaatagtgttaggacgggctccttgatatgcagttggaaggtggttccacattcaaggcagcttaaaggagctcagtcagcatcagcaaatgatggatgctccttccttagtctccctgttaacatgacttagcctggctgctttgcaccatcctcctaccaaataacctcctctgcttcctcaaacatctactccctcccacctgagtatgcctcaggcctgccttgatccccactgtctatcttttttttttttttttcttgaaacagggtctcattctgttgcccaggctagagtgcagtggcacaatctcggctcactgcaactacctcctcctggattcaagcgattctcctgcctcagcctcctgagtagctgggaccacaggcgggtgctatcacgcccagctaattggaataaaatcatttcttaaacaatatggttcctggaggagagacactggaaactttctttcttttttttttttttttttaaacagagtctcaccctgtcacctagactggagtgcagtggcatgatcatagcttattgcggcctcaaactcttgggttcaagtgatcctcccacctcagcttcccaagtagctgggactacaggcacacaccaccatgccaggctgattttttttatttttatttttggtaaagatgaggtcttgctatgttgcccatgctggtctcaatctcctgagctaaagcagtccttccgaagtgctaagattataggcataagccagcacacttgcctcccactgtacatcttaacagcctgtcaccttcggctttggctactaactggcaatgactttctgtattatttagtccaagttgccaggagagagatagagttgagtccagttcatctttcccaccagatgatgagcccgagttcagtgtagggatttgtaacccttggggcaggtgctggcccctggtccgactagaagaggatcaaacatgcaattgtccccagcaggtgctgcaggtggattcccttagaacaggatggcggaagagccacaccaagaccaacatcttgattacagtagcatacagtagtgtcaaatctgcctcccttaaagttttttgatgaccactcccttccccaaacatgcattggcacacagatgatgaagactgggaaaccccaaagtcgacttgggaacagtgtgtggccagcatgggtctaacctgttcatcaaagtggggccatggaatggtaggttttcttattatgttttttatgaaatgtgcttatcatttttcttagttttaattttctatcttgatgaaatgctaatttttacatgatcacaaaaacaaatagaactgtgacattcatttttcagtttcagtagctgattttcatgttggttggattgtctgttcaatagctacacatagtgctttccttagagaagttactagggggatgtggccctatttccatcccaccaccctggtcaatgctgttatgcaggggtcagcaaactctttctgtaaagggccagatcatcaatattttcggctttgcaggctgcatacagtctctatcacaactgctcaattctgctgctgtagtgtgaacacagccatggacaatacataaatgagcaggtagggctgtgttccattaaaatgttatggacaccgaaatgtgaattccctgtaattttcacttgtcatgagttattctttttttgattcttttcaaccattttaaaatgcaaaagctattcttagctcatgggccgtttgaaaaacaggcagcaagccagatttggcccacaggtggtggtttgttgactcctgctattatagaaagaatgagagtaaaacaaacctttcccatacagtctgatgctcatggcaagagagacgtgaccaaaagctgccgtggaagtcccaaaaagaggcactactctcagcctgggaggatctgggaggcttcagagaggtaatgcttgagctgcatcttgaagctgagtggagaaggcagagaagggagttctagagagaaggcacagcttgtgcacaagcaggaagttgagtaagcctgggagccacaagcagctcaccaggctgcggaatgtccagaaacgagtgtgcaggtccagatggtgaagggcttaatgagacgggcaaaggtggttggattttatcctgatggttggtcctctagactttccaaaccttgcctttaaaataaattatcaatcggaagctccctatgagaaaaaggttagaaaattatcattaggcagggagcagatggcgcatgcccataatcccagcaccttgggtggccaagacgggtggatcacttgagcccaggagttttaagactagcctgggcaacgtagcaagaccccatctctacaaaaataaaaataaaaatcttagccaggtgtagtggcacatatttgtagtccaactgcttgggagtctgagacagggagatcgcttgagcccgggagttaaaatccagcctgaacaacgtaacacgaccctgtctcttgagaaaaattatcattgacttggttctttttgtaagaccaattaccaagcgctgggaacatgggaggaagcaggggttgggagtttccggagccctacaacttgccacaccccatccgggcctgtccctgaggcatctccaaggaacttctagagcagggtgtgaaaaccatggctaaggttgatggagtaaaacagcgggattataaacagacacaatctgaatgtgttctagaaagattactcagaagataaagtggctgcaataaggttggaggcaaagcaccttattagaaggactatcatttgttcgaatactttcttgagctcctattatgtgccaagcaatgtgtggagacatttatatcatggtaaatagggtagacaataaacatttggcaaattaatagttacttttacattaagatgatagctaaaatttacagctcacctactgtatatcattattctaagcactttaccaatattaactcatctaatcctcactgcaactttacaaaatgggctgtattattactaccattttaaagatgaagaaacggaggcacttcactaaacaggtaatgtagcagaggcatttgggggttgcaggtgttggggtaagttctctttaaggaggccgaattgacaccaggaagataagaaaggccggttgcaggtttcccttgcagatctgggaagagcagtgctggcagactggagggcatgtgcaagaactcaaagatggaacatcctggtcttggtggttgtggagagcaaaatgctagtgtggttgaggctagggaggtagaggagagagtatgaggggaggaggctggagaaggaagcagcaggcccagcctgcaggcctccttggcaatgggaaggagattagattttcttctccgagcacaggagagcctttgaagggaagtgaaatgattggatttgaattcctaaataacggctgccctgtggggaatggatgagagattggccacagcggaagaaggaaaacctgcaggaggctcttgcagtagtccagacaagaaataatgtcaccttggccacgagcagtggtgacaaatatggagagaaacagatggattttgtttattgcaatcattcaactgagggacgttgaagagctgaactgaggttgcagcaatgaggatggagaggaggggtgaagtgaaataggtttttaagacgtggaggaccaattagaggatgagtttaatttttgttgatttttagatgccttgggacatacaggaagacaggaagagttgctaagtagggagttggcaatgaagttaggagttggggatccactctataaaccttagagtgtgccaggccctgtgtcaggccccacacatccctgtttgggctatatgtgcactgaggggagtagccaggtctggctcatctttctttcccaggcatctatcaggttggctaacacatggtgagtgagccctcagtaagtgtttctagaactggaaaaaaggtactcttcatctggtggagaagatagtgattatagcatggtgagatgagtgcgtccaagaggagttgacactggggctctgttttgaggaaaagtaaaagctgggcagcaacagggaagtgtatttccttttgactcccttcccaattagccaggattccttgtcatcccctgtctccccgcaacctgactgaggaagcgtgttacctaacacaccagctgttcctgatcatcgccccttggtcttctcctgaggctcctttctctatcattgaccccttttaaaaattggattccgagtgcaaagccttgcttctctgaggcaatagaggggggaatagcctagagcagctggtggctgtaggtgtaacctagtgtcagcccccgcacttagcaatatgtttcttcataaccctgcagagctcttgtgctgtagacctctaatgcagcctgtagaccccctgacagaataatgttttttaatgcatgaaatgaaaacattggattgcaaaatagatgtaatatattaatatatcgatctatcaaaatgttttttcaattaaaggtatagtaatgtatcttaacacattcaatagcaagatatagaggcagtaactaccataatttcaaagtagagatgagcataaatgatactttgagatatctgcaacaactatcaaataatatgaaaatatctgatttcttttggtgacaaagtcacaggttcagtaaatactgctgtggcctgaatccatgattaaaggaaatgctaagttccagttagagctccctggaataaagatttttttttttcatccagtttcatggattccctgaattctgttcatgaactgtggatatcagtggagccccactctaaccattcatttcagttaccaagtgtttcagaaaccaatgacatgaaatgcaaagtttagcattttatttcaaaactcatttgactggtttattttgacaatagggagtttgttcccatctgtattttacagatcaagtacttggtcaacagcaagtgctccataaataataggtggatgagtggatgggtgggtggatgagtggatgggtgggtagagaaagctcagaaaggataaatgactgtctaaacacttacagctcataagtaatagagtttgaacttgaaaccacatattttttactctaaatcacttgttctttctattcttccatgctaccatcagctacttttatttgaaaggacacaatgatagggcatgttcttaaaaatatgcatttgaatcatgggaaaggacaatcctattattatttgctttggtcagagcacacctaaagtactgtgtttacttcttagaagcacattttaagtacactgaatctgttgactgttcatggactgagatggcgagagacttagaaattgtctcttacaagctatcaatgagctatggatgtgaaattcagagaaggccagtttacatggtaatgggaggtctggggtggttttctattgctccccaaggcagaaccaaggcccagtatttacaagggacgaatcttggctcaattaaagaactcagtaatgattaggcctacttatcaatgtatcataattgcctgatgagatattgactgaaagtattcaaacattgacccatgtatttatttatccctttgataagcatttattgacaacctactccatgccagatgctgaggtggatgctgcattcgaagtgtagaatacaatactattggagatagtcagtcttataaagatggagtctactgggagacagtaagtttttaaaaacaatagttataataagtattttgaaggaaataaatggagtgctgtgattcagaataaaaactgaggtaggaacgggaagagctatggtcatgtgtccacgagtaggtgacattcaacttgaaacctgacagattgaaaagagccagcctacaagggagtgaaggggggtggggctagaagaagtagcaagtgcaaaggccctgaggcagaaagatggtaatgtgtccagagtctgaaagaaagtgactggacttggggagcagaagcagagtgcaggaggagaagaatggcaaggaatgggtgtgaagacgtcatcagggatcagctcagggagagtctggggaggcatatggattcaattctcagcattgtgatgggaagccattggagaattttagtcaagggagtaacaggacctgtttcatgttttaaaagatcactttggctactggacagagaataaattgaaagttaaaagggagacaccaagagactcttgcactagatcgggaggggaatgaatgggcacttgggctgaatagagcctgtagagatagagaaggtgaatttgagattattgggaaattcgactgagatttttaatgtattggatgtggggagtgacagaaagagaagagttgagggtgattagtggtgctgttgaccatgatgggtagcaggaccagagggaagaaaagtctagataaccatttgtcagcacctctgaaaccatgtcacagatttcagtggttcttaacaggggataatgacatttacttaggggatgttgagaaatgttggggagagactttcacagtagtcaacataatagagggcactgctttgtggacaggagtcaggaatgctagaagtcccgcatcacacaggacagctcccataatgaggagccatcccatgtagaatgccagttgtttcctcctggacaagcactggtggactgagtctctttcaattctgagaacctagggccaggtgcggtggctcacacctgtaatgccagcactttgggaagctaaggtgggcggatcatgaggtcaggagttcaagaccagcctagccaacatagtgaaaccccatctctactaaaaatacaataattagccaggcatggtggcaggcacctgtagctactccggaggctgaggcaggagaatcgcttgaacccgggagtcagaggttgccgtgagccgagatcgtgccactacactccagcctgggcgacacagtgagactctgtctcaaaataataataataaaaaaaagaatctaggaaaatgcagtttcacgctatctgccattcatatacttttgtaaattatttgagtcaggtcgtctttttataagtaattgactgaaattagccatagggaggagaaggaggttgtgggggtggggaagggacataaagcgggaagaaggaaggatgaatcttggagagtgggactttgctggtgggttggcctgggtggctgggaacactggggcccgtcgagggaggggagagggtagaaggaggtgaaatacaagcttcaccaccttgcatgcttcccacggctgtgctgcacaccagtgatgttttctggtctagaggctgcccagctgtgtccctaagcacactttgaacctctccttttggtcatttgagtccccagtgtaaattcttccttcagacgatcagagagctgccataacttagtcagatcccggtcaacactgtatacactagaatggagaaaagcaacccgagccttcctagctaataaaatcactgtccgacttgggcaaatagttgtcctttccatctccttagctgaataaaagtaatctaattattttcaaacacatgatttcatctggacctcacaacaacactgagaggcagggcatgtggtattattaggtccattttacagatacagtcactgaggttcaggagacttaacttgctggaatcaagcagtctataaggcacagagcaggggccagaacttgggtgcagggctccttcaggggtttcctaatggcaagtgggccccttgggaagtaacagaaaatgatgaaactgcttcaaaacaaagggatcccaaagggaacagaatataaaattaactgcccaagaaaggcattttgtcatgtacaagaaattgataggtacccagttggtatttcctcccacctggtaaggtaaaatcaacatacaggaatccttttagcaccttgggggtaaaacacttgactcttgcttggtgctcaacattggaggccccagttttgtgcccattccctcccgatgatgccgcaaaagctggagcatggctgtgagcaccctgcctcgatgagccgggccatctttcacatggtaggggcagggccaagctgtggctcagctctagagggtgcctttcacaccctggaatgcatgactggcaccccctgcagttgtgcagggcacaatgggagagtatttattgtccatgaaaaatcatatgaagcagctgcaaagaagtctaattgttttcctcatgatatgcccatgactccctgcacacacacacacacacacacacacacacacacacacacacacacgtacacacacaaacacacacacacctcaggagctttggtcccagtttgctatatcaggcccaaagctctttctctctttcagcccaaacatcgcttgagccaaggtagctttctcctccaactgagaaaagtttccctcttagagccggcaaacgtgtaggcgtgacgttatgcttagacacggcaggaaggagaagcagagtgacaactctgagggaaccaagaaagcccaaaggggagacaaggtttagagcgaaatcaagatcggattttgtcatgaaaggcagaactggcaaaagcatcattacaaggcattaaccttgttacacacagacgaacaagcagaggctgggattcagaaataaattacacataataaactagacagaataggctgagagcaacattagcgattatgccctaaggggagagaagggcaagatagaaaataggcccgaaaaaaagagagaaagaataatctctggacacagggggctgactgcactgtttcccccttcttctgcctggctccctgggtattaacctcacttttgtgaggacgtttctccggagcctgtctttcttttgttttcatttgctgcaataagcataagaaagccattcaaagggttccttttcccattcacagggacctgtccatttctgtgtgtttccagcacaaaagaatccatttccattcagccagagcagcccctagagttttcatgaggtccaagcctcctctcctgttttcttccaggctcgctgttgtaataggctgcaaaatcctgactgtggccagggtcctccaggctggtgagaggaacaagcatttgtccacgtcctggtccctgcagctggggaagaactgcagtttagtgtccgctccaacaagttgtgattgtcatttcttaaacagtgacttccttttggttccaagtagcagaaaacgcaaccaacagtggcttaaaccatgacaactattgttaacttagtaaaatgtttaaaagttgaaggtctgcggctcagtggtgtctccaggaacatagaatctcttttctttcccctgcaccaatcttagcatgttgctttgtatccttcatcttgaatctcatggaaacagaacggttgccacgagtctatgcatgatgagatcacacaactgtattccagaggaggaagtgagggaagagggcaaacgggttctcctcaagaggcttctgttatcaatgaggaaacttattcccagaaatccttccagtggacttctcacatctccctgcccaggactgggccacatgaccaccctcagctctaagggttaggaaagccagtgtctggcaatagggaatggagctgccatttggcttggcccaacgatagcttccaccaggcttgggttcattgctgtctgaacaaaattagggttcttcttggcaaagagaaaataactgccatgggtgtggcagtaacttgtgtttttaaatgaagtaatgatagcaagcatgggttatgtgttgctatgtgccaaacctgttctaagctttactgaggcttacgcacaaactcacccagtcctcataaaaagtctgtggcataaaaagtctgtgctcttatcatcatttccatcatatggaggagaaaactgagtcacagagagattaaatcacatttacaaaattacttagctagaaagtgacagagccaggagtcaaacttaggtggtctggctggctctctatgctatactgccttcattaggtaagatgataaaatacttcaggtagcacacagtaagtattagtacatgttagctggtattattattattattattattattattattattattattattactatcatcatctcttttttgtaaccaccctgccaatcagacacatcagccttattagatactagaaagctaacccctaacagcattaaattaattgcccaggtcacacagtgagtgagaaccaagctcaaatgtaaacgagtgctgggtgttctctcaagtttgagaatgttgatttaatggctgcaccacttacccatgctacttttttttttttaaggtaaggtctcactttgttgtccaggctggagtgcagtggctcaatcatagctcactgtaacctggaactcctggactcaagtgatccacctgtctcagcctcctaaataggtgggacaacaggtgtgtgccacacatctggctgattttttatctctgtagagatgggggtcttgctatgttgcccaggctggtctccaactcttggcctcaagcgatcctctcgcctcagttacctatactactgatcccggacttactttgaaaaaaaaactacaattgttgaggacagccagaaatcagagaaggacaccgggaaaggtgagatggtaatttgggacggatttttccttgttccgttttagcttttgagctgcctctgttttcttggatccagtcttttgcaaacaggatctctcatcccacctcaggaaaggctacccatggttcttggtgaattagaacaggtacagtattaagcacctactgtataccagacctggctgtacactgtcccacctggtccttgtggataatctacagtccacatccattactttttctgtgttgtgagatgaagggaatggagtcctctagccagagatagtggtattagaacattctggatacccaggcagagacgatgccctattctccgcgttagcctctctgcagtgttcaaatatttaataaaaataacaggcatggtcagctgatcttacgtttgaacaattctggatttattttaaagcaagatgtgtggcatggttttacttatttttttaatcctaaaggtcatccgacttttctttttctgctcatagtcatgaggcttccttatctaaacagtgatctattgttccaaccttagacccacagagaatttttttccttaacttcaattttcacaggacagctcctcatcttcccatattgcatgaaaagtatctttcaacaagggaaaaagaaactctaatgagctttccctaaatcttcttaaaccgagttcactatagaatattttatgcaaaaacattgccttctcttaggttatgacatcttttccttgaaaagtgatcagggcattggacaaatcctggctagcttatcttgtccttgcagcgcaacctcaacaaagaaatatagatggcactttaaaggcttcagaaatcaatttagtcccataatccatttagtttagatgttaatgaaacttggtgggtttaaaaataatgaatatttaataagacataaattgaaagacataaacactgttggcgataatataatgaagttaataagtcttagcctccccctccccaaatagggcgattttaggagttgctgtgttgcttactgaagtttgctggctgcaacttcaatgtgcctttaaaaaccttagtacagttgggaactgagctctggcagataaagtgtgctatcacactgtgttcagtagctgcagacggcaacggctcttcctagctccatatcttccagagatttgtgtaacaaactcagtttcctgtcgttgaaggcaggatgcagcacgaagcacttcattccttttaaacaaaaaagaaaaagacattttggtcgacactctctctgctctgggtttaaagaggggctttatttaatgatcaggaccaagcgtgtgattacatgtgctcagagcctcagacaatttaaatgccttcaggttgggagttagactttttgttttcccctttaaaagcatcagcaccagggccagcccttcaacttggttcctccttagctctgtggctcgatcctacccatcgtccacaactgtatctttaccttttcaccccctcaactagctaccctgtctttaggcttcctgtggtcccttttggtaaatctagaatccctcctttctgccatcacacccaacaggatcgtccgtgtcacatcttgggaaatgtttgtgtttaacctcacagaagccaacgcctagctaaaatgaattggcggcaggattttgaaaacagccaagtataagatagtctgcctcccaattcagcggtgggctgtctcttggcactaaagtggaattcagcttcttatatcagctgaggggtgttagatagatggccagctcgctttggcactcaatacctgttcatacatagtaaacaggggttttctttggttgggcaggtatggtgattttgcaaggtaatgaaaggttgctcccggggaatctagtctaagagaatatatgtggggcccagaagtgagatcctgcctaggagggcatgagtgacatttcatcagtataatgagaactattgttgttaaaaattattattatttttttgtgcgtttgtgtgcatgttcagaaagaaggggatcaacctgaaagagtccaaccaatcgcatcatctaccttgatccattccgacctgacatccgtttatggcaccgtggtaatgaacaggactgttttattcttggggactggagatggccagttacttaaggttggttttctgtgccttcttcaaatgtctattttaatggtgatattttgtactttaaaaaaacatttttttaatgcttctgggttatacatgagaccaaaccaagaacttcatgaactccttaaagacccccagaaatggcctggaagaaaatctggaattctgtatgtaagaatgccccgtagccatgtaatgaagtatcagctaccttgctgcccaggagtgcaccaagatgtttttccttccttactcataagccagctgggtgaggtaaatggaggtctggtccctaccccaaccctgactcaccttcccaagacatgtaaccttttagttctagctcctttatcatggaaatgtacaaagcacctgatttctcacaacttgaaagagatgagagattatagggcttgaaaagaagaaaaaacaggtgttctttccctccagcccacttaccacccacagagggggtttgttttttgccctttgtacccacacacaccacagagaggttagagatctaaaatcctttgagactcctcttgacttttatctcagaggactattttttctccactgtgtggacacaccccggtcaagtgcaggtttttattcacttaggagaggggaagaggggaggaggagaaaataaaatcagagataccaaatgacttgtctgaagttatctagcgttcatcttatcaatgtcatcagcaagcatttattgaagaccttctgtggtctccaacaacattcctggtcaggaactgcaccatttctatgactaaagactgagattccttggcttctctgcagccatccatttactctcagctcagatttttaatcgagtaatggtagatctgtttccctcaactgatctcccacagataactcgctgtgtgactttaggtgaattgcttaacctctctgagccttcatttccttaccagtaaaatacagttctactagacaacccagaaaaacgctttcctcttctgaaagtctctaattctgtcttctgcacacgtattccccaccatccccatccccaagccaaacctatttacttgctcctgtttgatcctgtttccaaatatgatcctgtttccacacttgctcacactgtacctccagcctgaaatgcttttttcttttttctcttatttacggcaccttatgtgtctatgctgtggctcagctcaaaccccacctcctctttgatgacatctaggcctggagtgaccttgctctcctctcatttcctgaaatactcatgatctatgtcattcttgtggctcattccaaatgtcttgcctggagacctcaccttttcactggtgtctgtcttgccttcccaacttgattttaagcctcatgagaagggggccatgaattcccacagcctaatacagtgctgagtgcctggtaggcatttgatttaatctgttttctttggaggaaacccagtaacatatgggagggagtttgtttgtatacacattcttttaaaatatacattgatcatctttcctgttgtgttagctttatttcctggggaagggtaaatacccatccatcattctacacaagtcactgggtgacgtctgtagctccaccaacctggtcaggcttattggacccatttgcctggcgggagtttccatcaagcctttctgggcctcctcaccaattatctcttcagatttgggatgtttttgatgagtgttttgacaagaacactgtttccccaaagccgagccaaccaaaccgctacatggtgaattggaggtgaaggaacactcgtctataaatagttccccatgggatggcctggttttgcctgtcctgtgtgttcacccagcagcctgcatgccgctggccagcttttagcgatgttgtggcaaccagggagtggaccaagctgcagcttcatgctgctgaggaggccgcagccgaccgaagtctcgctctcctcaggatctgtatggggtacccattcagaagccacctgtgtggcctcgttgtttttttcaaggtttgaataacaaaggcagctttttgttgtttgttttgtgactgctaacatttacacagtgcttcctagatgccaagggactctatatcttctaccgaattcagtcctctccatgacacaatggggcaggcctactattcccattttacagatgagggaatcgaggcccagagaaatgggatgattgttgttcaaggtcacacaggggcagagcagggatttgaacctggaatgacttcagagactgcactaagatcccctatgctgcactgactttgcaacctctgccgcacacattggtactactctctgaggattccgggggcacatgggagacatgcagatagggttccatgccgtggctggggacacatgctcctggggtgagtcagccttcctagaggctcaggaaagagtcccagcttgagaataaggcggaccatctgactgaggaaatacctcactggcgtggtaacttcttgggaattaacacccaccccccaagcccccaataagagagaagttctctcactcaggagaagggtgtgagggatgaacttgagctgacttgccccaccaggctccctagggcagctcagtaatgcccaagcctctcccctgtatcctgtgtacagattcttggatgtagcccctgaatttacccagaatcctgaagacccaggatcgtgtggatgatttggaaactaccgataatcctcaaatccctttattcagaagctttcagcttctcccttgccaaggcttgtcaccagaactgttagaaaggatgaacactgatagacacaagcttggctccttaagccacagcgtgggggaactaatgagcggcaaaaaacaaaactcaacccaacgcagacagtaggaggaggagaagaaagagggcttggatcagccacagcctgactcatcagtttctgagtgatcatgagttgacggcattttgacatgtgccaggcactgttgtgtataccttgttgaatgagagtcaggaaacagcaattggggcccaactgctgttttttaccaccaccagtaaaaacctgacttcttaaatctctgcaaatcctgtgagttttaatataatttggtgcaattttaagcctcatgttatttaaataatttttccttattgtaaaggtaatatatgctcatgtaaaaagttgcagagtcgtcgggggtgagaggacaacaaagaaaaaattacccctaatcatgtcatgcagaagcaactgctgtcagcattttggattctctatttatgtagttgaggtcaggttttgcatccttttcttcagttagtgagggaaaatgcttacattaaaatgttattgcaaaccctttgtaaaaagtatttttaaataactatatcatattctattatttgggtacattattttgaacttaagctaagatactggatcacttttaaagtatctttaaagacatgcattttccaaggaagatggcattacctccaaaggtaagatttcactgataatctgtgaagaaactaaaggctacagtatgccagtacctttactgtcctccttctcttgcctatagacctaagtccctttataagattttggggaaatagaaggaatttagagctcaaagggtcctttgagagcatctaatctgctcttttattttatcggtgtaccgtcccatggtcgtgaggtgagttatgtctagtcacccccgcagttatttccccatcctgcttcttttcggaacatgattgcatgccgggtttttttcagtcgtcagcatctccactgagatcagctgaaaagtatggtcacactgaactcagctttggggaattcacactgcacgtgttgcacaatgtatgcatttctgtaaacacacaccgagtctttctccagattatagtacagcctatcatgtggtttggattcctttgagctgactctgttgcccatagaaaattgtccttatttcaaaggcagaattgcatattttgagcttttccaggtggtaaagtaagtaataacagaatatgcatgaaatttgaaatttgtaactttatgcatgcccattaaccttcgtgtaagcataaaagataagaaggcaatgggcaaggaagaataatcgctaacatttctgagctcttcctgtgtgctgggcattagaaccagcatctgcacgggttaactggtttaatccttaccagtcaatactctcaccatccccactttataaatgaaaaaacctgaggcctcgagaggttaggtatctttttcaaggtgctctgaaccaaaataatctgtcccagagcccgagcttctatcccccaactaaactgcattaactcttacagagcttagtagagtttgagagctggtttttgttatatttctttctaatactggggtataagggttgataccaagatgcagatgtttgaggtttcataagaaggggccgagaaccctgtggtttagtttgttcctatttggggatggcttcctggcaacccagctgagtgcagagcccgctcctctctgagctgcgcgtagtccacgggggtctctgaatctcctttggggccccagctttaccccagtgggctcctttgtaggaaaggtaggaattctgtattcaagttgctgttttgaatggtgtcagcagtaaagactagtgtctccccgacctcccagggactgcagtagggttcaggatacaggaagctatatcacatagctctatcctgtccccatatccagtcttgaggtatttcctatgtgcttgggctcagactggttacctatgtggccctctactcccacttaatggctttcttttgtttatttttttttcttttttgagccaaggtctggctctgttgcccaggctggagtgcagtggtgcagtctcggctcactacaacctctgtctcccaggcttaagcgatcctcccacctcagcctcttgagtagctgggactacagacctgtgcccccacacctggctaatttttttgtatggacagggttttgccatgttgcccaggctggtctcaaactcctaggctcaagagatcctcccacctcggccttccaaagagctgggattacaggcatgagccactgcacacggcgccactcagggatttcgtttattcaaatcacagcaaaattaaaccggttccaaaaagttctgtctgaattcaaacagaagcaaaaactctgtactgcctaaagagtctgccttgactctggttattgaagtttttgaatgaatgtcagagaaaaaaatcttttgtaaaggcaagctgtactatatacccagaagatgttcaaataaggaataggagaacttggggaacctagaacaggacctgggaccggaagtggtggtggtggtggggatgactgagctaacagaccaaaaagttaaaacaggaggaagtgtcaaaacttggaagtgggttcattggttggctgtttaggatgtcatgtgaagcctgcttcaagttctccccacctcattaattgcaatttatgagtttgcagggactccccagtttgaaacttttagtcccatataatccacaaatctagaacctgtggttcagactgtatgcttctcttactacctacactgcaataagtagattggaaacaaaagagaaatttgccttgatctttatatttcatctttgttactcctaactactgaggcacattaaatacttaccttgctttctcctgtgtgtgcatgtgtgtgtgtgtgcacgcatgcacaggcatgcacgtgtgtgtatatgtatgcaggcatgcacgtgcatatgtgtgtgtgagcttgtgtgtgtgtatgtgtggtttaagtctccttcccagcatttctcagaaactgcttatggaaaaaaataataataaatgaaagggttggcttgtttgcccttcaactggttagccccacagagtgaggcataggaaattaaatttggcataaaatattatagctttttgaacacccgtggcttttccatctcatggtaatcgtaaagaaaaaaaaatagttttttgtttaatttttctcccccctcattttcctcaccatgatatccttcctgtgggtgatcttgaacctgtcttacaattgtatggtgttgaaatctccactcagttaatttcagcagtgtagttgggagttttatatgcaacaaaaatcccaaggctcgttaatagtctaccatgaggcttcaggaagacatcaacagaaacaatatgttgacacgaactgaaattctccatcagagaaaatttgttttctacacaggcttcagctggaaaaagctgaagagccctataaaatcttgaatgctaatagcgtcgtttttcatttaataaatatctactgggcaccttgtatgtgccaggcactgttctgggtgctgaatatacaaaggtgaacaaaacagacaatgcccttgctctgctggtgggaagaaaaagacagaaaacaagtaaatggattaatcagcgataaagacacttcagatagtgctatgaagaaaatacagtgatgggtagagagtgacagaggtgttcagcggagaagtgatcagggaaggcttctcagaggaggtgatgttggagacttgaaagataaaggagtatacaagcatacacatggagaaggttcagattgacttcagattagatctatattaaggtcgtatcctggaagataaaaatccacatcgtgcccaaggattgtgtgtgtgaattggatgagatttctcttatgcaaaattcaacccgttttgggtttttgtgactcattgttacttcctgcattgcttcactgatcatgttctttttccgaggctgcccacctaaactgagctgaggaaggaacgtttcccttgctccagtcttgctggcttttgtctgtgtgttgatattctcctgaagtttgcaattagaaagtccaagtgttccattagtgcctgtgggctggggctcgggctaggtgagagatgatatgaacactgacctgtcctttagtcatctgagagagatgagactccaggggccacggaagcagaaatccctcacccctctgtgtagcacatttgggacctttgtggtgaaaactaaaacttcctcttgtcctgtcctcaggattatggagagcattgtttgcataatctagcaaaaagaaaaacaatttgactcactcaccctcaaggatttttaaatttaaatgttatatatttatttttaaggtaatacaatgatattgtttaaaactcaaaagaaccaagaaaatattccgtgaaaggcacctggtcttgacttccaaggcaaccaatgatagtagtttcatgggtatctttccagagatagtttatatctgtctacaggcaaaagagtgaagatattcttcctcccttttgttgaaacataaaacacagtaaacatatatgttatatatgtaaaaatacctgtatatgtaaatatgtctatatttatagatatatgtacatatttcatataactttaaatataacacaaagagctttctaattatttttatagctaaatagtatttccttgtttgtactatagtttacttaaccagttccctattgctggagatttaagttgttttaatcttttctttataacatacaatgctacaatgaatatatgtcatttcatatatatgtgtgtgtgtgtgtgtgtgtgtgtatatatatatgtgtatatatatatgtgtgtgtgtatatatgtgtgtgtgtgtatatatatgtgtgtgtgtgtatatatatatgtatatatatatatacgtatatatatgtatatatatatacgtatatatatatgtgtgtgtatatatatacatatatatatatatatatatatgtatatatatatgaggggctgcagggtccaagggtatgtcctttgtaattttgatagatgatgccaaattaccttctagagaggtctggcttccaccactgaggaaacatactaatttaaacccagcatctatggctatcaggacaagcttcagtgcaagccacgctaagtagctttttcaggaaactgattggtaaatcctgggccacagaactttttgataacttgtaaaaaaagaaagaaagaaaaacaaagaaagaaagagagagagagggagaaagaaagaaagagagagaaagaaaaagaaagagagagaggtaaggaaggaaaggaaaggagaaaggaagggagaggagaggagaggagaaaggaaaggaaaagcttccttgccacaattcagagttctagagagaatattgatgcttcatttccaaggtaccaagtaaataaatcaatgttgcacccaactagatcttgctgaccatctgtatcaatgatgctccaagagtaaataaaataagcccccaataaaaactgcagtgcagctcctaatttacgtaaaatggatgagtggtggtgtaaagtatgtttttactttgttattttaaagcaaaccccacagacatgatgtcgtttcacctcaacatatttcgttatgcatctctcaaaacctacagttgttttcttaaataatagtaaccataatgccatgatcacagctaataaaattatcagtcattctttaggatcacttactatccagtctgtgtaactaagtattcccaattgattcaaaaaggtattttaaatggttttgttcaaattggtatctgcacaaagtcctcaaaccaaatttggttgttctattatctagagcagtctcctcccttacttttattccctgccactgacttaactgaaaaaaccaggtattttgccctatagaatgtctcttatcatgtgtttggctttttgcttccttgtggtgtcatttagcttgttcctctactcctgcttcctagtgctaaatggaagttagtgctaaagacttgactagattcagtttcaactttattggcaagaatacattatgggtggtgctgcccaatgatgcttttgccatgatgaattcctgaagagataccagggcagcagcttctcttctcttgacccttccttgataatatttctatcagtgtttgtttaaaaaaaacaaaaactggcttcctgtttctctttccctatacaactgctttccagaaccagatcaactgaatctgagctgattaatacagctaatgaattagagacggcaaatcctggcaagcccataccttggtcagtgcctgtcccttggctccacttacaggattctgtagagcagtgttggccaagagaactttctgtagtgatagaaatgttctacatctgtactctccagtatggtagccagtcaccttaggtagctagtgaacacttgaaatgttgctagtgtttttaattaaatgtaaatttttaattaaatttaaatagccattatgtggctagcggctgtcatatttgatagtgcagctataaagtcgttttaaaatgacttgagacacacacctttcccacctcccttaggacctaactgcttctgttttaaaaagagcttttaagaagtcatatttcatatgtttggttagtgagattgacttttacaaagctgctgctgaatttgatgagcagtccaagggcttcaagtgagccactatttgcaccaaatccacctgggcttggcccaagcagatgatggaaggaagtcactgatcgcagggcaaagctagactcgggcccaggtcctggaaaggagaagtgaatgcgggaagttgctctgtgcaaaattgataagaagcctttggctaaacagcaaatccctaactgccatcaggatatgtgggaacaggcatattattgattagtagatgtgtgaagtagactttgtccaaaaagaatctcaggtgccaaatttttcttttgaaaccatgcgcccaatgtggctgatgtctacagtggtagagatatgaatacagataatctatctggatgtgttcaaactgacaaaatgttgaacaccttcacttttcaaagtagtgggtacaaattgtgttaggtacaaagaagattaaaggttaggtacaaaggtgattaagacatggtcccaggccaggcacggtggctcacgcctgtaatcccaccactttgggaggcagaggcgagcggatcacctcaggtcaggagttcaagaccagcctggccaacatggtgaaaccccgtctctactaaaaatacaaaaattagctgggtgtggtggcgcatgtctgtagtcccagctattcaggaggctgaggcaagagaatggcttgaacctgggaagcagaggttgcagtgagccaagatcgcaccactgcactccagtctgggcgactgagtaagactccatctcaaaaaaaaaaaaaaaaaaaaatgacatggtccctgcgcaaaaggagcttgcaatctagtaacagattattatctattgactattgattatgtgctaagcatctttcatagttcttatttgatccttacaaaactgtaataaggaaggcactattagccccattttagagatgaggaaattgaggcctagggagattaagttaccagttcaaagtagtgcagctacttaaaggatggaggcaggatgcaaactcaagcttaagccaccattatacttctctagcactataggattcgagtctcccgatggctcttcatacccacacttcaaaccctgccttcttaccatctcctcttgctccttgacccaaagccctgccatggcctcctctctctcatctacagtaaaaggcaggctgtttacacaggcccacaagacccttgattatcattcccctgttatcttactatcttactgttcactcctctacctctctccactgaagccaccctggcctcctcccattttagtttctttgcactgacagggctgcttttaagaacatgtttcattcaagtatgaaaataactcatctcctgcaagtctaaataaatatcaccttttcagtgacacctaccctgaacatatattctcttaacccctgaccccactatattttataatttacttttttcttattaatagtctgctgttactcaccccaccatacacacacaggaatgtaagttctatgaggtcaggagctctcccttccccattttgttcactgccatttttcaaacacccagaacagtgctgggtacataatgggtgttgggtagatgtttgttgactgaagatggatgaagctcaggtgtgtccaatttcaaaaccactgagtactgagtcacacttgcgtatattttatatgtgaacacaaacctacttgtctgtatctgccaagttaatctgggtcacttctaactgtatgatgatcagagtatcctgtgcaaatacatgtgggagctacttcctttaatttccagtctctcttgagacagcactaatgaagctgtcacttgtggcttcctatagggccagacatggtcagaaattgtggtcagccagcttccacatatgaggatactaccccagccctgaagagcggctttttttgtttgttcatttttggtaactttgcctttacaaaagaagaaatattatgcttgttattaccagccttgttgaggactgagatgtgggaggatgattaaggagcatggtaccttaggcagtatttgtagtgagtgaaaaaggatgtagctttatgattaagctacaatttttgccaccctgctattcaaagtgttgaatagaggccggaagtggtggctcacacctgttaccccagcactttgggaggctgaggcgggtggatcacgaggtcaggagatcaaaaccatcctggccaacgtagtgaaaccccatctctactaaaaaaaattagctgggtgtggtgcatctatagtcccagctacttgggaggctgaggcagtggaattgcttgaacctgggaggcggaggttgcagtgagccaagatcatgccaatgcattccagcctggcgacagagcgagattccgtctcaaaaaaaaaaaaaagtattaaatagaaatcatgtttctctttttgaaaaaaaaaaataggttattcttggtgagaatttgacttcaaattgtccagaggttatctatgaaattaaagaagagacacctgttttctacaaactcgttcctgatcctgtgaagaatatctacatttatctaacagctgggaaagaggtaggtagaaatactagttattgcttctgatttatgaataaaaatggtttaattgatgtcattatctagtagcaaagcttttactttgaactacagagtttaagcagtgccccaggctttgaggagacccgcagtggttcacaggcacggaattaaaaaccttactgactgtcagtaagtaagcaagaaatattatctatttagacaattttattattggctatatttccagtgccaagtttttcagaggagggtgtgcttggaaatgggcgcataatcagcaaggtaactgaatttacacatttattgtgtgggcactgaacggttagatgcatttatgaatatacccaatgggactggctttggaatttggggttaatatcaggccacagtctcatacacattcatgaaccaggaaatatatggtactccccctccccctcttcatttatcttgctgttttggcttttcttttgcttctgcttactgaaataaaagtaatatatttttatattttcttcatctttaccaagtgctgtcaccaagggaaggggaaaagaaactaattgttaatgagtctctactatgcattagtcactattctttgcatgatctctgtctaggtgcatagaattgtgtacatatacatacacacaagtgtagaaaacagtgttaatgaaatgtgttactgaccgggcatagtggctcatgcctgtcaccccagcactttgggaggctgaggcaggaggatcacttgaggccaggagtttaaggctgcagtgagccatgatcaaaccactgtaccctagcctgggtgatggagcaagaccctgtctcaaaaaaaaaaaaaaaaaaaaaaaaaaggctgggcatggtggctcacacctataatcctagcactctgggaagccaaggcagggatcacctgagttcagacgttcaagaccagcctgggcaacatgatgaaaccccatctccactaaaaatacaaacaattagctgggcgtggtggtgcatgcctgtaatcccagctacttgggaggctgaagaacaagaatcgcttgaaaccaggaggtggagtttgcagtgagctgacatcacaccactgcaccccagcctgggcaacagagtgagactctgtctcaaaaaagaaaaaaaaaagaaagaagaagaaaaagaaatgtgttattaatttaataaaaataaatgtgttattaatttattttatgtgaagaatctaagacttggagaggttaaataacttgttcaagaannnnnnnnnnnnnnnnnnnnagaggttaaataacttgttcaagaatatctgtatctatctatctatctatctatctatctatctatctatctatctatcatctatctatctatctataggttagcctttgcagggctgtgacaaaaactcaaccctgattctaaagcctctgataaatgatattaaatccaaaatttgtgaaaactggacattccctggctcagtggttttgacctatgaccgtttgaacatggaaagtgcaaagaagataattgagacttacataattatataatggatgtaacagatactctcagcccaaccctggttttccattcttttcctttcagtcattctaaggaaaatagcaatgacagcaatctacatgtgctttttgagtcacagataagatgtgcaagcaatttgtagtttctggtattcttataaagacgatactgttctttgcacattgaaaagtcagttatatcaaaatgaccacactgagatggccacatcttcccacagagcttgtaaaccagtccttcaccatatagaatctcctatgccaatttgcttcaccatgcagacactttgtattatgtttcttccctggggatcccatctttgaaagacttttgtctacccaacaaactgcacatattaagtaacagttcccattcccagggtttatttatcaagggcgtctcaaaactgccggtcagagtactgactgtgttcccacatggagctgataaaattccaacccaaagcaaagaaacttgatatcttccttaatccatgcgtgtttttccattcagctgtctgaaatattgcaaatagctcataagcccccattacttccttcatggatagtaatggaaccccagaactcaggaccccaggctgggaaccattatgaaaagccaccagtagttgatgggttcccactttctagaaagcaaaaagttctagcctctgatcattcaaagcctgaagtcctgggaagagtttttgactgggcatcaaagctggttagccctgcattcttcactgaggattactgctagagatcctactgtttgaactctggctgagcaaatataacgcctaaagagacaaagtccaaggaaggctcttggggagataagaacagccaaactaataagctatgggatatccataaaatggtatgatacggggccgctaaaaataatcatatggagatgtaggcattgatatggaatagtcactacggtctgttattaaattagagggcaggtctaatgtagtatttttagtgtcctctctctctctctcttttttttttttatggagtcttgctctgtcacccagcctggagtgcagtggcgcaatctcagctcactgcaacctccgcctccacaggttcaagcagttctcctgtctcagcctccctagtagctgggactacagtcacacgctaccatgcccggctaatttttgtatttttttttttttaatagagacggggtttcaccatactggtcaggctggtctcaaactcctgacctcaggtgatccacccacctcagcctcccaaagtgctgggattataggcgtgagccacctcgcctggccctctctcatttttttttgaaacagagtctcactgtcgcccaggctggagtgcagtggtgtgatcttggctcactgcaacctccacctcctgagttcaagagattctcctgcctcagcctcctgactagctgggattacagacgcccaccactatgcccagctaaattttgtatttttagtagagacagagttggccagactggtctccaactccaggcctgaagtgatctgtccacctcagcctcccaaagtgctgggattacaggtgtgagccaccacggccagccagtgtcctccctcttatacagagttatatttgtgtgtttaaatagactgagtaatagttctcagagaatgttctggagacccatattccacagaatgctctgagcaaaagtggtcccagaaccagctgttacttactatacccctcctggaatactgtgaggctcagcatagtcaaaggctccgagaagccctgtgctaaggaaacccgttttgctttttcagtctgaggttttatgtttgctggatcatggagcccttttcttgcataatagcagtaaccaatacttattgaacatttagtacctgtcagacaatagttcataataaccccatgaagtcgtgatccattttacagatgaggaaacaaggttagagagattgcatgacacttattaaaatccatcagtgttacagaggcatttgtgaactacaaggaaatacctctattctggttaattccggctcaggatcacgggctgccagctgcatctgtcagcagtgttggggactatgaaatggaagggcgtggttatcctccatgaagtcaacttggaactgaaggatccagctcaggatagtccttgttttcctcacaaaatagagaaaaatagagaggtcccttctagaactccttatttctctaacctgctaaagaagttatttatactatctagcatgtacaacttcctggcataatgagttccacaagttcccttactacctgctgtgtggttttgcctgcagaaagtgctctgtgtgatgctcagttactccctgcctctcaccgccctacttgcaggctctgactggctgcctagatgtctgggtctgcccagctggggtgccctctttgtgggctgctgtttcctgacaatggcaagaggcagctctagggatggggaaatgatttgactactccccctgtttcttttattttcaactccactggaggggtgtgagcaaaacaagccaggagctgaggtgacggcgctgcccctggcaggggtgtgggagggcctcgtccctggtcctcctcgtttccacattgagtgccaaactcctgctgacactcctggggcagagcctttgttattccctaatactcatttccaaaatgccattggccacatatggactgtctctgtatgaaaaccaggcaacctgattccatgatccgtatggaaatcatcattagcagatcggaaacccaactgggtgtcagactcacctgagagagagctcttaaaatacagattcctggccagacacagtggtgcacgcctgcaacctcagcacttttgggaggagtgctttgagcccagaagttcaaaaccagcctgggcaacgtagtgagaccctgtgtctttaagaaaaaaatcttttaaatgaaaaaatacaacttcctaggctctgcccccagacttagcgagagtctctgcggcagaggcctgggaatacgcactgtcaaaagctccccaggtgattgtgatacaatgacttcatgtcctagatcttgagacccactgcccagtgccagtatggaggtgttgagttcaagttgataaataggctctttttggcccttcattagataaggtgttgtagttttcctgctgttgcttataattccatctgaaccattgtcctctttccttttaggtgaggagaattcgtgttgcaaactgcaataaacataaatcctgttcggagtgtttaacagccacagaccctcactgcggttggtgccattcgctacaaaggtatctcctgaattctttctcaccaactcgcatttttgaaaaagtgtcatgcggcagaacacttgttgccctactttaacgatccattccagtgacctgagggaactgatctcttcctcgactaaaatcttgttgtgcaatcctaatgaattctcgaaggtgtttccagcggcgtccgtgctatgcaatcactggacccgggagctccccagtctcggggcgggaggggcaggtgtgcagccttcaggagaacgggagagagcaggcaggtttggcttttactttctccagagttcgccaagactcaagagagaggcaaaagggccccccctccgagaagataaaagaatagagatgtctgaaaatttttcagctgaatccccatcatgtatgtcatgtattctgttcgctccgcagaagcctcgttattgatggcgccgtctcctaatgcgccgcgcagctgtgggcctgatgtacaatctcagtctccgggcagaatctgcccagcctggtctggaatgacgatgctcacgacccatctaggctcaggggcgactcggagcggcttccccgccatggcagtttcctagcgtcgctgggcccggcctggttggattcgccgtcgccatggcaacccagtactggggctcttgctggagaagcaaaggaggagagagccttcgctgcagctcaggcaggaaagagagagagagagagagaaaaaaaaacccataacagtgtctgtcagtttggtgctttcagtttttaaaggtgaaaaggataagaaagagcagagcaggtggagagatgctgaaggctgaaccaggggacagtttgggtttagaaaagagcaggaggaagagaattggtgactgaagggggagacagccaagagaaatgaagggagagggggaaatgcaatacaagcaagaggtttaggaaacaaatcaaaaatacggggatggaattaattaagagttcacgggggaaggcgcaatccgagctgcagcaagaggaataattgcccctgccatttgctacgcttccttaccgggctgtttccgtcagagtcactggcagacaaacgaagcaagggccagaaaaatgctcatgaataattcactgatcacgaacgggatttgtttgttgcacactcagtgagcagtcttgccataatcttttagatccattcatttatgtagcatccctgtctgtatttgtagagctgtgtacaggagtcaattcgataatggtggcgatgatggtggtgattaaatagccacatggagctagcggctaacgtattaacaagctcagctctggagcttttgggagatctccaagctggtgatatgaatttgggagttggtagtattttagatggtacttagagaagccttaagaccagacgaaggagtgagtgttgattgaggagagaagtttgagaactgggccttgaggggctgtggtgtttaggggttggggagaaggaggggaaacagaacaagaaataaggagggagcagtcagaaggggaagaggaaaaactggagagggtggtctcctggaagccaaggaaagaaaggaggaggaagtgatccactgggtcagattcagctgagaggtcaagcaggagaagaaaagaatggatcctttgcacttagcaggtgacaatgggtgactgctgggaatgccatggttaggagtggcgctaaatccacaagagacaatgggaaaataagaccttaagaagggacagcttagagaagctttactgagaaaggcagctgaaaaaaatgaagcagacactgaaagcgaaagtagagtccaaagaattttgtctttttgtcctttttttttttttttttgagatggactctggctttgtctcccaggctggggtgcagtggcatgatcttggctcactgcaacctccacctcccaggttcaagccgattctcctgccgcagcctcccgagtagctgggattaccggtacgtgccaccatgcccgactaatttttgtatttttagtagagatggggtttcaccatgttggccaggttggtctcgaactcctgacctcaggtgatccgcctgcctcagcctcccaaattgccaggattacagccgtgagccaccacgcccagccagttttgtctttttaagatgcatgaaataacagtgcatgtctgcactgttgggaaaattccagaagagaaggagaaatggatgatacaggagagagaagggttgtggagtgttcagtctttcagcaggtggaagaaaatatgacttggtgtgccagtagggaggccagcctcagacaggagcactggcccctcaccctcagtggtaggagggaaggtagggactctgggcccaagcatggggaggtggcagaggcctgtgtggtgtcttctcctattgctcacattattttcagtggcctacggccattgagaatgaggtgagggaggaagcactggaggtttgaggagaaaagagagagaaggagtggactggaagactaggagggagaatagaatagggaaatatcgagcggttgccaggaagcattagggcccacttgaggttgatggtcctgtgtttgaagtgagagctgtaagcatggttttgtctttctcaagctgcgttcagctttggtggtatagctgtagactcagaaaaagttagctttagccagtttgggggctttgccggaaaatacatcaagaaaggagagagtggccagggagctgagggagcatgtaaggaatggatgatgatatcgatatggatgttgattcatataatgatggcacttgggctctaaggagggaaataaggacctgataggggtagggatgtgaaaaggtggcagggtctgtgttggaagttgaagttgagtttaaagattgttaggggcaggcgcggtgactcacgcctatattcccagctttttgggaggccaaagtgggtggatcacttgagcccaagagtttgagaccagcctgggcaacatggcaaagaccccatctctacaaaaaatatgaacattagctgagtgtggtggtatgtgcttctggtcccagctactcgggaggttaaggtgggaggcttgcttgagtcccagaggtagaagttgcagtgagctgagatcacacctctactttccagcttggatgacaaagtgagaccctgtctcaaaaaaaaaaaaattgttggaactagagaattggaaaggggaattattggactgtgggggcttgatattgaggtcatggagggatggagttattggcaatgacagggtctgccatatgattgtcaagatcattggcagagaggtgtcaaggaactgaggtggttaccagagtactaaatggctccatcatctgtgtggaaatcgcagtcaccaagagagtgaggagctacatattcaaggaacgaagggaagtggccagggctggggtggtctgtaatgatcacaatgaggagggacctggggtggtttgagctgacagcatgggctttgaagctggggaggaagtgttggaaagagagaagaaggatcttccagaagaggctgcaagacacaaataggacagctagatgagggagaggaagcagccaggccttgagaggggcctggggaagctgtggcctcgaaggagagctggtttcagtaatattgagaaggggaaaggaacaatcagagaagaggttgaagacatgggggcttctgttgataactggctgtgagttatagtcttttgtttgttttgagacagggtctcatcctgtcacccaggctggagtgcagtggtgcaattacagctcactaaagcctagacctccccaggctcaggtgatccttccactgcagtctcccaagtagtggggaccacaggtgtgcaccaccatgcccaggttttttttgtattttgtagagacggggtttcaccatgttgcccaggctggtcttgaactcctgggctcaagcaatcctccttcctgggcctcccaaagtgttagaattagagacgtgggccaccacacctggccaaaagcctgcttctgctcttgctccctcacccctatcccagtgcgctccaagaagagtgattcatttaaaatccaaatcagattatgtcactccccagcttaataccctcccctggctttccatcttagaactcagtctgactcccttgctgccagggcctgcataccaggctttccgtgatctggcctttcaccacttctctgacctctcatgccattctctcctttgtttacttaaccccagacatcctgatttaagactatgctaagcatgttcctgccccagggcctttgcatgtgctgtttcctcagtctagtacattcttccccacatctttctatggcagactctttcttgacggtctggtcctagagcacacatctctctgcacctgcctacccagtcttcagtagcctccccttactcacagtgacattactgttttattttcttcatggcccatcactattaggaatgaccttacttctctacctctctttattgaaatgtgctcagaaaaacataagttaaatgaatgagataggctgagtgattggtcgactctgccaatagcaggttaagacttgtgccttaaatcttataagacattctgaagtcatggagcgatggcccttcacagccatgtcagaaaccacttggtttcagacagcctgggttctggcctacaatgaaatgaaactaagtctcatatctgtgactcatatgaagctcccagtaccattcaaaattaggaattctaaagggggatgttttcttataatggtagagcatcccactgtgtttattttaaatgtcatggatttatttagaaaaataatttattttctctgttgagaaggttgagttttcttgcatacatgtctagaaagtggaatggtggggagaggcaagaaaactatcttcacttccttttgatcagatgttaagaataggcatccagactgggcatggtggctcacgcctgtaatcccagcactttgggaggctgaggtaggtggatcacctgagatcaagagttcaacaccagcctggccaacatggtgaaaccctgtctctactaaaaatacaaaaattagccaggtgtggtggtgcatgcctgtaatcccagcaacacgggaggctgaggcagtagaatcacttgaacccaggagacggaggttgcagtgagccaagatccagcctgggtgacagagtgaaactccatctcaaaaaaaaaaagggaataggcatctagtataagtagataaaaagcaattagataaacaatgagctctaaaaagtctagtattttattgttggaacctcagatccaacctgtgctgaatttgtctgtgtgggtggaaagtgaatttttgcaggctgaatatcttgggtttggaagcagtttctcagtttctcccatattgcaaagcatagcacatgtgttcagttatggatttccacaaaactggcaatcccgaaccaatgaatgggtgaggttccaaaagttcatttgcaagtttgtttggcatgcagaatgcattttcccatagaaacaatgtcataaattaaggattgattcccaagccagcccataaaatccaaaattatttaatttcaacaaatatttattgaacacctagtgagagcctaatctggggcatgagatagctaggtagtattgagagaaatcggatgccattcttggctttaaggaactcgcatgctagctgggaaggcagacttatcaatggccaacattcattcattcaatcctacatccaatcacaaatattttttaagcacaacaatgtgctaagtcctatgctcagtgctcaggatacagttctttcttgtctctatagagcttgcaatctaatgggggatataatgtgtatcagttaggtttctgatctagtaatgctgtataacaaacaacccccaaatccttagtggtctaaaagagcaaacatttatttacatttgtttttcatgctcatgggtcagcctgtcagctatgggaagaagggtggggtcaatgtcaagctgaaggttgagttcaggtctgtttcccatgtttctcattctgtacatgctcttcttaaggcacatagaagtagcatgagagaccaagctaaactagacaacatgttctaagccctggctgacatcatgctgactaatattccattgataaagcaagctgcatggccaagcccaatatccatggagtagggaaatatattccacctactctagtggaagattctgcaaagtgacctggcaaaaatgtagtgtgggtgtgtcattctagtacaggatggattgaagaattgggagcaataatccactcttatcaataagtaaaggagataaatgaatagagtgtcataagagctagcatgggggaagtttagggtttcatgggggcacataaaattatctaacccaaacttaacaggtcaaggaaggcttcctggaggaagggatatctaatctgaacctgaagggtagggggatatcagctaggtaaagatgaggcaggggaagctggtgtagggaccaggctgtacaaaggccaggagagcttggcctgaagctcagtgtggacgagcttcacattaaagaatttgaattttgttggaaggaccttggggagccattgcagggctttaattaaaagtgcgaccagatcaggtgagtgttttagaacgagaactctggggtgcaaggtggaccggaggggactgagaagagctggcagatcagttagcaggtggctgtaaaccagtaagagaccagggactgaattagaatgatagtagtggtgagggaaggaagtgggtggattagagagctatttagaagatagaattgacagggcttagtgattaattagattcccctttgagtctgacacactaaaaatagggccataaaatgaaaaataaaatctcaaggtggccactgtttttctggaagatgtatcctttctcctttgatctcagtcttcatgaagaaaacaaacaagtgatacccacatgtacacttgattcttcctgtgtcccaggcactgggctaggcaccaggttagaccccaaaagatgggcacctgagtcaaatgtgggagggcttctgagagacaccagcgctgagtctcagagtgtgcagtggggtgagttattgcattgaagctggtgttgagattacagcggaaggagtgcaggcatctggctggggtgaccagatggacagaggtgtcggttactgagtagggagtgtagaaggagtggcctgtttgggctgcatgggaaacgcggggggtggacttccacactggcaacatgggcaggacagcctatgaggacagaggaaaggtcctgtgtttgtctgtttttgcactgctataatgaaatacctgagactgggtaatttataaagaaaagaggttagttggctcatggttctgctggctgtacaggaagcacgatactggcatctgctcagcttctggggaggcctcaggaaacttacaatcatggcagaaggtgaagggaaagcagggcacgtcttacatggctggaacaggaggaaaggggggttggggaggtgccacacacttttaaacaaccagatctcaagagaactcaccatcacgaaaacagcactgaggaaatggtgctaaaccattcatgaaggacccacccccatgatccaatcacctttcaccaggccccacctccaacactgaggattacaattgaacatgagatttgggtggagacacagatccaaacgatatcaggtcccaaatgcattttgctttggatagaatctgggctttgtgtgacctgccagtttcttatctctgccacttctcctcttctataaagtggcatttataattggccaggtattgcaaaaaagtgctgggattacaggcacataatcctgggattacaggcactttgggaggccgagttgggtgaatcacttgagcccaggagttcaagaccagcctgggcaacatggtgaaaccctgtctctacaaaaaatacaaaaattagctgggtgtggtggcgcatgcctgtggtcccagctactctggaggctgaggtggaaggatcatttgaacataggaggttgaggcttcagtgagccgtgattgtaccactgcactccagccttggtgacagaacgagaccttgtctcaataataatagtaatagtacctgcctcagaggtttgctgagagaattaaattccataacgtacatcattgtaggcccagtgcctggctcctggtaggcaacgaagttgtgtcaactgtcatttggtggaagcccaaggaggcagtcattacttgtccctgaggttgggaaaggcttcaacgaggaggtggccttaaaattggccttgaagcctgggtagaccttcaccaggggaagagtggtcgggaggcatttcaggcagaagaatcagcgcagtgagaggtctgtggagagactggcagatggagttctatgcactggctgtagaaggaaggaagtgggtggagatgctgggtgggctctcagggtggaccttactagcgggtgctgggaactcatgacagggttttaagcagaggccttccagcgccatatttgtgttttaaaaagattatcccactggcagtgtggaagatgaaccacgttaatccaagtctctcccggcctcccaccccacccttcctgggtcactttcctctggtgtgttttgtaaagagagagtttatgtcacatctcgtcctgagtcagttacttggtggctattctccgaattcatgtacctccccactgggagaggtagtacgtctcccagtgcatccatggggccccacttgctctggttttagtgccatgatggaatcagggctgggtcctcttcagaaaatgggccctacaggaaagagcacacttgcattcaccctcccaacacttcgtgctccaccctgcactgggtacacacaggtggaggcaaggcccccaggcatgctgcttataaggtatctgtatgcgtccttcaattatctgtacaaatttcacattcactccatatttttctacatgtttcttccatgttgacagttggaagaccttcaagcagcccctggtggctgtttttaggtcttcagctgcagttaggctgttccacgcatgagatcgtgaaagagatcatttctcgctcggtctaacagcagggccctgtggtcagtcttcctatcagactttctgaagggttgggaataacagaagggtatttttaacacatgagagaaaactgccatctgaatgctaaacatatttgtccccaacaccccagagtaacaaatgaaaagaattacatgagttgcttgtggacacgtcccagctcctttttttatcttgctctcctgtcttgagggttcttctccaagtgacactccttcctcaagccccccaggcctatcattaacctgctgggatccttcccaccaggactgtgattgccctgaaacttgaccagtataatccatggtgcacagtaatttatggccatattcttcagtagcctgagttagtctgttctgtcatcatgagaggtgagctacatacagcagagagggcccgatagggcttagatgttttgtctcctccaaatctcgtgttgaaatgtgacctccagtactggaggtgggcctgctgggaggggtcgggtcatgggaacggatccctcatgaatggcttggtgctgtccttggcaatagtgagcgagttctcactctgagttcacaggagatctggttgtttaagagagtgtggcacctgccccctcacagtcttgctcccaccctagccgtgtgacacacctgttctcccttcgcttccagcatgattggaagcttcctgagcccctcaccaggagcagacactacccatgcttcctgtacagcctgtaaaatcatgagccaattaaaccccttttctttataaattatccagtctcaggtatttcttcatagctatgcaaaaaatggactaacacagggtcacagaaggctttgcagtagaaaagtccagatggatgtgactgttcctcattcagaaggcggctgcagtgccccttccacagggagcctgcctcgagtccaggcctggccaggagacagtgtgcatgggtagagaagaatatgcttatcatacattagacactaccttgcacgttctgtgccatgttccatttagtcctcctggtaccccatgaagaaagcactattacaatccccacttcttagagaacagccttagcttatgtatagtttcccacagctgcagaaacaaattcccacaaacttggcagcttaaaacaacatgcacttgtgatcttacagttctggaggtcacaagcctgcagtgggtttcactgggctgaaaccaaagcattgacagggctgtgctccttctggaggcccttctttgccttttccagcttttggaagcagccagcattccttggctcatggtcccttcctgcatcttcaaaaccaacagtgtggcatcatcagattacattgggcccacccagataatccaaaataatctgcccattttaagatcctccacttactcacatctgcagagtcccctttgccatgtcctatggtttgaatgtatcccccaaagttcatgtattggacacttaatccccagtgcaacagttttgagaggtggaacctttcggacgtgattaggtcatgaggactctgtcctcatgaatggattaatgacattatcacaggagtgggttagttattgcaggagtgggttacttatcacaggagtaggttcctgataaaatgatacattaggcccctttctctctctctctctctctctctgtctctctctccctcgtgctttcttgcccttccaccatggaatgatgcagcaagaaggccctcaccagatgcaggccccttgaccctggactgcccagtctctagaactgtaaaaaataaatttattttctttataaatttcccagttagtagtattctgtaatagcaacacaaaatggactgagacaccatgtaaggtgacacagtcacacattccagggattaggacctggacatctttgggggccattattctgcctactactggttgtacaagtaatggattcaactctgggcttagctctagctcctaagccattagagcaaaacaaagagacacaggcaagggacattatccctcatggcagtgggtggagaggggagagcctggagcaaatggccctaatggagcatttgtgataactgctatgtataagaaagacacggcactcagggcccacctgagtcagagaaaaccctccatcttgaaagcttaggcaaccatgcattcatttaacaggtatttactgagtacctgatatgtgtcagtcactgtcctaagcactgggattctaagcactagcagtgagtaacacaggtcaaaatccctccacacgtatgttcattgcagcactattcacattagcaaagacatggaatcaacccaaatgcccatccatgatagactggataaagaaaatgtggtacatatgtgccatggaatgaaaaggaatgagcagccatgaaaaggaatgagatcatgtccttttggggatgtggatggagctggaagccattatcctcagcaaactaacgcaggaacagaaaaccaaataccgcatgttctcacttataggtgggaggtgaacaatgagaacacatggacacagggaggggacaacacacataggctcagctaatgcaagctgagcttaatacctagttgatgagttgataggtgcagcaaaccaccctggcacacatttgcctatgtaacaaacctacacatcctgcacatgtaccctggaacttaaaatgaaaataaaaattgaaaaaaaaatccctgccctcatggagttccctctagtgaggtgttttagtttcccaaggctgccataacaaattactaccaacacaaatttatcgtctcccagttctggaggccagaagtctgaaatcaaggtgtcagcagagccgggctccctctggaggctataggggcaaatccttcctcacctctcccagctccgggtgactcctggtgtttcttggcttggggtaggataaccatctctgccttggtcttcacatgaccttcttctgtgtgtccaaatctccctctcctttctcctagaaaattcccattcactgggacaccctaaatccaggatgatttcatctcgacgtccttaactctttacatctacaaagaccctatttctacataaggtcacgttctgaggttctgatgggcacgaatttgggggaacactctttaacgcacaacatgagggaagatggacagtgtgaaaataaatgaggaaagagagaacatgtcacagagtaaacagggctgtgaaggaaaataaagcagaaaaaggaaatggggagcgctagttggaggcagggggcgctaaatttaaacgggagccctggaaggcctcagtgagaaggggcatctgagccaagacccaaagggacccactcagttttggggctatccgccttcatgggctattgcactattgagtggaatggccgacaatttgagacagaagagccttcctcctttccttccaatccgggatgtgtccttgtgcagatctcaagcttgacgtctgtgcggtgacacttctttatggtccagtgaggctctaatgacagcaataatgataatggaattggggatggcccctccttctcgtgtgaggaccccattgtgccgactaattgtgtagaagcaagtaggacaactgtctgtggggtggaagcggtggggagcaaagaggaatatgtcctttgggcctcagggaattactgaattaccgttgtgtgggctgagtccatgcatctgggttactgtgaatgctggaagggatttggggggctttccaacaccagaaggggtctgggggtcaacctgtgtcctgtgggttctctacctcctttttcagctgtgagaggagctatgagttctatgtatttcaaagcagaaggcaaaggggatagcagtgctaaggggcacctctccacccttggtgtcccagacagttggcactgggaaagtgctcgccatgctcagaagccaggcttttttgtttgtttgtttgtttggttggttggtttttttagatggagtctcattctgttgtcaggctggagtgcaatggcacaatctcggctcactgcaacctccacctcccaggtccaaatgattcttctgcctcagcctcctgagaagctgggactgactacaggcgcgtgccaccatgctcgcctaatttttgtatttttagtagagatggggtttcaccatgttggccagtatggtctctatctcttgacctcgtgatccccctaccttggcctcccaaactgctgggattacaggcgtgagccaccatgcccagccaggtttgttttttgtttagtggagctagtaactgacgttctcggacctcagcctccgtgctacttacctgcaccatctctaatggatgctctctgacttccaacaagcaccattaagaacatcccttttagtaaatatatgttgtaatggaatagatttttttgaaatgaccttatctcaggcagcatgcactttcataagaatgtattgattggcctttaaatattcctcaaatgttttcacttgtctctgtgacctaatatttgtcctgttcccagcatctcctccatatccaaacacaatgttcaggtcttcattcgaagccttcctgccagtcttttgttttttgctttttaaacattttgatgcttttattctgctatatggagggtgcactgtttctgataggccaaatgtgggatttgatattgctttcaggaggatcgggttttaatatcattgccacctgtttagtggtggagaaactgaggcccacagaggctaaggaatgtggcccccagttacacagggagtatatgggagagcagctttgaacccagacccttctgactcaagaggtgtcattttcccatttttatttccatgctgctgtttttttaaatggctcccctaaattatttagttcatggtttgcatttggaaataaacaccaacttttagtacactcattgcccacaaaagaaccacatggagcaaaggccacaaacccattttgtgtgagtgtttcagtctgcaaatgtgttttttatgtgctaaatagctcaaagtttcaagacaaaggctgtttttccaccacgccagtgaacaggccaacctagtgaacaaaaatcaatgaaatgacttctgctggtatcactgaaacacagacaagaatttagccattttaaaatttccttgttaatccaattcagctaccttttgttgaatcccagccatgggccaagtcctgtactaggccctgggggaaacaaagatgaatgagggtctactctgatgaagttcacaggtgagtgtgggaataatttcaatacactgtgtaaaatgctctaatagctggtactcaaggtatgaaaggactccaaagaaccctttaatatttaggaggaaacagagctgtgattaagaatcccccaagaagcctcgaattgtgtctgcctccttacatagaaaaggcatgttgggcattgagctggtgtgtgagcaatgccaaagggcatctggtcaacctcattgcccaaatccctttctcatcactaccattttgtctttggcttatgtcatccatttttttgcctaaattttctgttccattttcccatataatataataataataatgaatatttattgaggcataattgtaaactcttagaacagatgtacatttttctcccaacttcatcaggtgaaaactattatttgcatttctgcagatggagagcctgaaacacagagagggcacatgtcttgcttgaggtcaccagcttgcaaatgacacaaccactatcctccttccttcactaagttctagccaagctggtctatttcatcagttccttgcagagaccatgctttaagtgcactcagatactttgcacatgctgttccttctgcctggactgctcttcccactacttttttttttttttttttttttttttttttgagacagagtcttgctctgtcacccaggctggagtgcagtggcatgatctcgactcactgcaggctctgcctccagttcaagcaattctcgtgcctcagcttcccgagtagctgggattacaggaatgcaccacctcgcccagctaattttttgtatttttattagagacagggtttcaccaggttggccaggatggtcttgagctcctggcctcaagtgatctggcctcccaaagtgctgggattacaggcataagccactagcaccggcctcttcctactactcttgacccgactacatggttctcacccttgaatgcttagctgaaatgccatctttcttcactagcctgtctaaagtgggttcctttctactatatctttggtttctgcagaagacgtacctcaatttgaaattattttaaatgattgtctgtttatttggtttttgtctatgtgcttctctggactgtaagctcaataagagaaggaacttaactggcttatccatggaagtgtctgcagttcctagtggagtgtttggcatctgatgggctctcagttaatatttgtagaatgaatgccaggtatggtcttaggccctgagggtgcaaaggtgaataaggtgggcctttccctttgggggatttacagtgtagctggagagacaggcaggcaatcagcaactaatgcagtatgctgtgtagagtaggagcatgtgtaaatgtcatggagacacagaggagggagtgactgctttgcctggagtctgagcaaacatcatagaggaagacactgaaatagcccttgaacaaggaatgtgatttcaccaagtgttgcaggcccaggcacgttcagggcagtgaggatggcacacgctcgggagggcctggcctgtttgccctgtatgtgtttatcaaatgcctgctctccacgaggcactatggaatagataccagggatgggtgtttttaggagcttgcagtctagagagatagactcatcaaccaaacttacctggggatgagtttgaagaggaaggcaggggccagatcacagtgttggggtcagagatgggcatggaaacatgtattgcagactgaggtgctgaaaggcatgtagacaggagagtctggtatgggagaaagggtgtcatgagagatttttaagcagggagtaacatcatcagctctgtgcgtaagagtaacccagatgttgatgtggaggttgatgagaggaacaggaagtgggaagcgggagacctcatttggctgctgcaggaacccaggtgagaggtggggggtaagcatgggttgtagaggatgcttagaattcgtttgggtacaagagttacccaaactagccaaagtaggcacaaagttttgtaatttgatccgccgtgaggattattgctcattaaaccagaccaggtagtggttcccaacatgtgtgactagaatttctcatccctcagaacatccttcaacaaaaaagctggaagatggtacatcattcattcttgtctcagaaagttacaaagcacagtggcatctacaaggctctgagaagtcctgcagcagagagacttgtttaattttatttaactagtgtttcccaagcttcttggcaatagaaccctactttaatattaacaccaaaacaaatccaggaacacagtttgaaaaatgctgagaaattgagtaaaacttgtattttcctatatgttcatgtcttggaagaatctacttgctattatgctggcatttgtgatgtcgctgccctggaagccttcaaaatttttgagcaattaggtgtagtagtaagagatagatgccagtgccagacaccatgctaactaacctctctgcacctccgtttctcaacctctgacatggaggtggtaacaataacacctacttcatgggctggttgtgaggattactgtgttaattcccagaagtccccagaaacagtgcctggcctatgggcactaggaaggtgcgatggtttgaaaatgtcacctaaaaagcgtgtgttgggaatttaatccccaatgcaactctgttgaaaggtgggacctagtgagaggtgtttaggtcatgagggctctgcctttgtgaatggattaatgccaatcatagaagggcttcaggctgcaaattcagtctctttctcttgttcacatgcgcatgccctcgctctctcttgctcttccacctcctgccatgggatgattcagcaataaggccctcgccagatgcaggcccctcgaccttggactctccagcctccagaactgtaaaaaataaatttcttgtctttataaattacccagtctgtggtattctattatagcaacacaaaacagactaagacagatgggctcagtcactattagctattctgagaggcaatataggtagctgatgagaccacaggctttgaggctacactgcctgacttagtaggtcagctcctctgcttactatccctgtgaccttaggaaagcaatatggaaccagctatgcctcagtttcccacatctgtgaagcagggacaattattgcagctacttagaggtttgttgtgaataataaatgaatcaaatcatgtgaaaagacatcgcctggcatgttagatgtttttgcttaaaaaaaatcttttaattgtctctgttattagcataattttatcatgtagactgactttcagcttcagtgatgaagatccaatttttgagctttcccagcaagttattttggtcttatgttttggcattcccctcttaaagagtctggaggcctttcatttgaagtttagtttgtcacagacttcctattctcgtccattcagtagactttggtttcctcatctcatggactggcaattgtaaagaaagtcccccgattctggagaccacctcgcccctccactgggctctgtgccttccctaaaaatgcagacatctgtttcaaatcacttagcaaaagaccttgggttgctcttatagcaaagccctcccccagcatggatgcagtctcttgtttcctgggagagagagaagctggattgtttccttgttaaaagttttctgatattatatcagtgtagaatctttggaacagttcacactaacccccacattcaagccacttacctgatatgtagttatcagattccttcagggactgtctgctcttggtgaacaattagattagaggatgctgatgaaatttgagtggcaggaagtagaagttacatttctgagttcagagtttctatttcaaggttgagtaagtggtaaatttttactgcaagattctagcctaacagagttggcttctcaaggtcccccagcccggcccatgggtatttcacctgcttggaaacttcagctccttttcagaggtgggcctccctgttctttatgttggcatgaaaacaattaataatttaagccatgcccattaaaaaaatagaaatgctgtataaatacaatactgtaataataaatttaaaagtcgatccagctgggcgctgttcccacactaccagctgagcagaaacacaaataagtaaagaagaaaactgctatataatgcaaatggctgcaatctcattgttttctgctattgtttattgcaaatatatagtagtaaagttacattatggataagtaggttttgtgggctaacctggaaacctaatcactgtttataacattatttctatgggggaaaaatgcattttatattagaaacagatggtttgcaagaaaacctttttgggagtagaatggatttctaagtccagggccgcctgaaattttaacctcttgctagttgtgtggttgtgttgtattcacagctagtgatagaggaaaattagaggcctctcagaatgcccacttctgtgttctcccccaaatccttgctaaccgcttcatcctacagtctctgccttaccttctgtcttctctgtttctggggtccccatccctgtgtcctcatcctggcccagctccaccctgcaaccactggttgaggtcccaggaagccaggaggaactatgaatgtcctctattaagtggtggttaggatctataggaaggcatgaagccagggggccaagtttgtgggctctgaaatcagacttctgccacttggcagctatgtggccttgatatgttactgtacttctctgagcttctgtttcatccgtaaagagtgaggttgttgtgagaactaactgcaaacactcccatcagtgcctggcacacagtaatgtttcctccatgccagtctgtggtggggtaattattcagggatattatgggttacacatatttctatgaacccaggaagcaaacccactgtatataaagactttctaagttttcaaacagtgaacttagaaacaagtgtctgggaccttcctgtttatgacttggggccggagtaggtttggaactttttttttttttaaatctgttgggggtgagggagggggcggttacatacttatatagttgaatgccaatatcaaactctagtattatctcgaatacattaagctctacagcagattttatagcaaactaacaagaacagctttcttaaatagtttcattgactgaattgtttctacatacagtgtttttcacataagggaagtctttttaaattaactttttggtttgggggattttttttttttccttcaggcaatcttttctttgcatttgggcaggttctgtattctaatttgcaaataggcttgtgtctgcctgcaggctttatcatgaaagtattagctctaagtggaaataaggactagaaaaataaaatactgactgggagtctgaggactttgggatagatcctcagtagaggatggagcaaaagtaatagtaagtcaagaaagcaaatatatctctaccagtttccctagaatatgtccattcttatccaaatccaattttcctcctattcttggcctgaagaaattgaaatgaagccattaagatatcagcctatctgagagtgcatcactgaagaatcagcctcactaagagtcctgtgtgacaatgagattttaatttaattagggcagtggctcaagtgtttatgcacttgaccgttgctcttgttgatacgcaggaattagagtgatagctttcaaaaggaattatttcagagtaactagctttgtttactaaaatatgggagctataagatctgctctgtaagaaatgtaaatgtatgagtaatatgctgtcatgaagattttataatctgcagtatttgagaagtaataagatactgttgttggctggccatctggttatacatacttggtgtcatggtttgctttttattttttcattttttatttgtactggtgagaggcaaagaataggagttcagaggtggtgggttgtttttttatatatatataaaaacaaggaatttatgtttagttgcttaacatggttagattttgtttttgccttatgcagaataaaaaatggaaggttcattttatactttcttttccctttttttttcaaaaagtaaaatggaaacctcacccccaatttgtccccagatttaaactttttgcttgttttaaaaatagtctctttggcatgaggaggagtcagacatgaattaaaactctagaaagaaaaatcagcaacagaaaagacctatagagatttcatatttcatcctttcattcaaaaatatttattgaaaccctagtatttgcatatcatgctgccagacactgagggatttgctaaagaaatattaaagaccttctcccttctttgaggagcttagagcttacttggggagaactgagatagacttatgaaatagttaagttgtaattcgaggcagcatatgattaaataccgaaatatgtacttctgacaagaaatgctataggagttcagaaaagggagtgataactcagtggcactactgttttctgcctacaaattggcaaattgtagcactatttgtatgaaatattttacacttgtttttttggcagccttaggctttgactcccaggcagcattaagagccaacaaaaatatttgtactccagtctcttcggaattggcttatttttttttttcttataggcagaggaagtgccttacacaaaccggagtgcccatgagaggcagggagtttttgacagtcatgatctatttcagatacaaccgaaagaaccagcttcgtcattctgtttttcaatccagcagtgcttgtctctccgttgcaaactctctctgacattgacaggcggtttaatttgaacttaatgtctttgacggatgagctagccatcaagggtcagataaatttatggctttggagaattgccgatgaaaatccccatggttataatgttggagaagaaactgacacagatgtagtgggaggtggaacacagatgtgcttattgggagcagggttccccaaatgtcagaagccggtgacatgctaaaggtattgtgcttggggatgacgtttagtgaaactcactgacttcctgttctatttttgccatattcaaattaacacagagctcaaagatgaagccatgaggcctaaattcttaagaattgaaagagagagagagtagagaaaggagaaaaaataaaacctttaggaagccaaatacactgtttgggcccatccattcctcattccgctcggatcccctccgggactccccgtagctgaatgtggtcatcatttggttgcttttcaatctcatgattcatgtgttttcagtttcttttaaaaattcaccatcactggtttaccacccctgcattttaatcttcagccttgaggaggtgtagtactagaaatatttcgttctttccttgatgctattcaatggaatatctgtggagtccaacaccctttggcgataacgtgctgttggtatttgttcttcttgctaggttggtgccccgtctggtgaggcaagggttcccaagttagtgtgacctagagtgactgacacatcaagcaagccagtgatctcaccactcagcttctgagcatctctttatcaaagtagttggccctggccacagcttaagacttatctgggtcagcctctgagctggctgacttgggaaaatggccctggaaaaatgtttcacctatatcttttgatataatttggtatctgtctaaataaatggtatgtagcagatggttatggaatgtcttatcaaattcttaggcagactctgcccttgaaatttttctatttaattatcatactgcaaagcacaaaatagtaactttgttattatttttaaacaaaatcaagttacacaataggttgatattctgagaatgaatagcaaacctaaaatttatacaatatgtgaactcttccttgagctgttctttgctaggcatttctaaaagggagctccctatttcagaatccatgggaggatgtgtttcagatatatttggcgatgtcatcttgagagatggctcaggagtcgaagttcaccatgttgtctacatttgttctttgctcctagacatgatggaaaaaaatgctctgctgttttcttgttgcttttcatggttttagcatcatgttcctattctcgctcaaatcaataatccactgtacaaagtctggcattttgtactgaagccaagtataagaaagttttaactaatgcacgtatggggtcgctgttttaactaacacacgtatggggtcgctgttttgttgcctcgtttttttaggtgcacttttcaaggagattgtgtacattcagagaacttagaaaactggctggatatttcgtctggagcaaaaaagtgccctaaaattcagataattcgaagcagtaaagaaaaggtaagaggaaagattttaatttgtcctcgttgtattgtctcattttgcacagcggatgctaaatttcttctgtgtgtaaaatatccattagcaatcaaacatgcttagtgatagcactccattcatttagcactcattaacgaatattgagtgcccaccagatgccatccactctgcaaggtgctggggatacagcggtaaccaagtcacatcatgggcctgctctcatggagtttgtcgtcttgtggagctgaagatgaccctcaatggttgaactggaagaaaagttggacttctaatgttgtagaaatacatattgcttttgaaaataaagaaaaaagaggttcagattcatggtcaacgagataccttaaaggtggcttaattgcagaatttgtttagtgtaatggtcccttatcctaatgtgttgaggcttccccagtaaccatcttatgaacatagcttccaacagtcttggtagcgatggagagaagaccaacatgggcagtgaccattgcaagtgaggtcctttggaaagccagtgggcccttgctatggcagcaccactcttgacaacacatcagtcctgtcattggatgagagaagggagcaaggagcatatttaagcattttcaaatgcacacgccaaccgtgccctacggaaaaagggaattcctgccttgcagtctcagtggtgctataaggaggcattttctccctaatgacggctcttgtgttatgaataattgtacagagtcctctgttatgaataactgtacagcagccagctgacctgtctgttgagctcactgtgttctgtttgaatgccatattaacaaggaaatgggccactttctcttttcccttacactttgccatttcagagaaatagcaagaactttaccacttacgatgatttaacatttaataaaggagagccaaagtatttaatgagtgataaataataaaataatcaagcttctaagttgtaactgatcagaacgaacagatttaaagttatttggctgttgtcactttctgttgtcttcctggagaaaaaaaataataataataactttcatacaaacttctaccagtcctgaatcagagtgaatagatttggtggaaaagattcttaggcatctaaacataggtatatccaaattctaatttctctcatcagtctgaaaaatagccaaatttggcgctaatagagaatagtagaaagtagaataccataatccttgaatatacccaggactctgataagtggttaaaattctggaagattttttttcttatgttatttataaaaatttaaggataatacttcagctaaatgtagtgggaggaagtagcttgttcattaaattaaaagtgctgcttatacaacttccgtacctagctaggggctcactattacaaattaatcactgtttatatctggtctggtacatttcaaaactgcttaccacccaaacaaccactggtgttttcttcctcgccctaagtcccactgtggtttaccctaatcttcccagagacttcccacacagccactgcctcactctctccagctcaccaccactctcaaagaagataagaagttcgtaatttgactaaagctatcctttgaaaccaacttcggactaattattttaatagtgttgataagccatctgattctatctcttgatcacattatttcaaaatatttcctaccctattgccacctttggcttacctgaaaatctcaggtctttgtttaaataaacctgaccctgacctatggagacggcagtctagggttgtgttcagttccacctattagctctattcaaaggctatttgctacctgcctatcatatgcctagtaacattctagtcactttgtaggcagagaaaaacctccatataataagaacctctgttcacagaagctttatttctttccacaaaacaattaaaagatagtacatcctcatactcactatgggatcagcattaaaaagaaataatcagagcaattccagttgtcctggagggatttctgtgaggttttgttgagtaaaaacagcaagatgcataaaagtgttcctagcatgatcttatattgatcaaaaaatgcccctgtatatgtttatgtatatatgtctctatatgattatttgagcatgggcaaaaatatagaagaattcaaacaaggttgtaaacatgggctcccctggtggaatgactgatgtggtggagaaggaaagcagagatatgtaataaaaatagaaaagacggccgggcgcggtggctcacgcctgtaatcccagcacgttgggaggccgaggcgggcggatcacgaggtcaggagatcgagaccaccccggctaaaacggtgaaaccccgtctctactaaaaatacaaaaaattagccgggcgtggtggcgggcgcctgtagtcccagctacttgggaggctgaggcaggagaatggcgtgaacccgggaggcggagcttgcagtgagccgagatcccgccactgctctccagcctgggcgacagagcgagactccgtctcaaaaaaaaaaaaaaaaaaaaaaaaatagaaaagacacagaaataaaattattattgttattatttattatactttaagttctagggtacatgtgcacaacgtgcagttttgttacataggtatacatgtgccatgttggtttgctgcacccatcagctcgtcatttacattaggtatttctcctaatgttatccctcccccagccccccaccccccggcaggccccggtgtgtgatgttccccgccctgtgaccaagtgatctcattgttcagttcccacctgtgagtgagaacatgtggtgtttggttttctgtctttgtgatagtttgctgagaatgatggtttccagtttcatccatgtccctgcaaaggacatgaactcatcttttttatggctgcatagtattccatggtgtataggtgccacattttcttttcttttcttttctttttttttttttttgagatggagtctcgctctgtcgcccaggctggagtgcagtggcacgatcttggctcactgcaagctccgcctcccaggttcatgccattctcctgcctcagcctcccaagtagctgggactacaggcgcccaccactacacccggctaattttttgtatttttagtagagatggggtttcaccgtgttggccaagatggtctcaatctcctgacctcgtgatctgcccgccttggcctcccaaagtgctgggattacaggcgtgagccaccgtgcccggcctacgtgccacatttccttaatccagtctatcatggatggacatttgggttggttccaagtctttgctatggtgaatagtgctgcaatatacttacatgtgcatgtgtctttatagtagcatgatttataatcctttgggtatatatccagtaatgggatttgctgggtcaaatgatatttctagttctagatccttgagggattgccacactgtcttccacaatggttgaactagtttacactcccaccaacagtgtaaaagtgttcctgtttctccacatcctcttcagcatctgttttttcctgactttttaatgatcgccattctaactggtgtgagatggtatctcattgtggttttgatttgcatttctttaatgaccagtgatgatgagcatttttgcttatgtctgttggctgcataaatgtcttcttttgagaagtgcctgttcatatcctttgcctactttttgatggggtcgtttgctttttcttgtaaatgtgtttgagttctttgtagattctggatattagccctttgtcagctgggtagattgcaaaaattttctcccgttctgtaggttgcctgttcactctgatggtagtttcttttgccgtgcagaagctctttagtttaattagatcccatttgtctgttttggcttttgttgccattgcttttggtgttttagacatgaagtctttgcccatgcctatgtcctgaatggtattgcctaggttttcttctagggtttttatggttttaggtctaacatttaagtctttaatccatcttgaattaattttttgtatcaggtgtaaggaagggatccagtttccgctttctacattttttttttttttttgagatggagtcttgctctgtcacccaggctggagtgcagtggcacgttctaggctcactgcaacctccacctcccaggttcaagcgattctcctgcctcagcctcccaaatagctaggattacaggcacatgccaccacgcccggctaattggaataaaagtattccttaaacaatatggttcctagaggagagacactagaaactttttttttttttttgacagggtctccctctgtcatctaggctggagtgcagagacgtgatcataatttactgcagcctcgaacccctgggctcaaaggatcctcccacctcagcctcccaagtagctgggactacaggtgtgaaccaccacacccagctaatttttaaaaattttttatagagataaggtctccctatgttgcccaggctggtctcaaacccctgggctcaagtgatcctcccacctcagcctctcaaagtgctggcattataggcataagtgaccatgcccatcctagaaacattcttttacaaatcagaactaaaacaaggaattccaccatcgctaatactgttgacattatttgtaaagccctgtccactgcagtaattcaagaaacaagtaatacaaattattatttgaattaaatataaaaaacattacttactcatcttaagtggctgcatatctgcagaatctaaatatgttagctttaaaaattattcaaatgaattaacgttaaatgaagtgctgaatgttcaataaatatttaaatatcaataaccttactacatgttaaataaaacaaacttttaacttcatgaataaaaagtcctattcataaaaacaacagaactactgagctataaacttaaagagcaaggtacatatcctgcattaaaaccatttttactaagagatatgtgttggagtcagctaccaaaaatagtaattttgctttgaacaacttagcttaagccgttctttgtaatagtagttagatagcagagcagtggtgtattaaggctattttttttttttgagacaaagtttcactcttgttgcccaggctggagtgctgtggcgcgatcatggttcactgcaacctctgcctcccgggttcaagcgattctcctgcctcagcctcccgagtagctgggattacaggtgcccaccaccaagcctggctaattttttatattttaagtagagacggagtttcaccatgttggccaggctggtcttgaactcctgaactcaggtgatctgcccgcctcggcctcccaaagtgctgggattacaggcgtgagccaccgtgcccagccttaaggctatttataatttatcatagcaaaaccttattaattaaaaacataagcataaagaaaaataaaaacaaaaatacaccaagtattttcttagaatatatggaaaacatcttgaacatattcaggcatgttctacatttcttggtgagaagatatcataaaaatgtcacttcttcctcacctatttttcttgatttcatgtaattccaatgatttttgagttagtgtttatttaaaattaatataaaattcatctggaatatcatgagctgatcaagaatatccaaaacatattttggaaaaaaaaaagaagtcaatttaggcaagaccactcccattagattgcaaacatagatgatagatagatagatagatagatagatagatagatatcaaaaataatttaatccatgattctggtttaaaaataggaatatagattcatagaatatagtggaaagctcagaaatagatgtaaaaattttaaagaacagatatcataaaataagaggaaacaaaaattatttcataaaatgtgtgagataactggcttatactatggaaacgtaatttcatattttacattaaatataaaaataaaatttagactaattaagaaattgatatgtaaagcaaagtcacagaagaaccaacagaaaatgaagttgaacataatttgaaagtatgatcatttattttacctctgaagcaatatagtatgtaataacaaaagaaaaatattcatatacatgatttccttttacaaaaaataagagttaacttggccaggcatggtggctcatgcctgtaatcccagcagtttggggactgaggcgggcagatcacctgaaggtcaggagtttgagaccagcctggccaacctggtgaaacactgtctctactacaaatacaaaaaaattagccaggcgtggtggcaggtgtctgtaatcccagctactcgggaggctgaggcaggagaatcgcttaaatctgggaggtgaaggttgcagtgaaccaagatcgtgccattgcgctctagcctggctgacaagagcaaaactgtgtctcaaaaaaaaaaaagagttaactaaagcacacacttcaggaaaatatttgccactaacaaaatattcatcataatgtaataacactaagaaaaattaaaaagaaaaacatcaatacaccaaaaagtaagtgggccaaaacacatatattctcacaagaggagattcagaaagtagatataaatatggaaatatgttcaacctcactagttttcaaataaatacaaattaaagcgataataagctatgctaacacccagtgttggtgatgccaattagcacaacctttttggaaagcaatttggcagcatgtttcaaaagtcataaatatattcattccgtttgaagcattaatttcagccttagaatcctgaggaaataacttgaaagaagaaaatccctaggcatgaagatgctcttgccgtagcatttatagaattagaaacctggaaataatgaaactgtttagcaataacgaatgattcagtaaaataagatatgtcgatctgataagagtgttgtgcagcaagcaattctttggccttgtgaatgttgcgggctaattgacaccccagctccctctgcatcccacctgccctttaagtcttcactccctctttatccagcttgattcacgaaaaagccatcagcctggtaaggagtcctatactgggtttcttaggacgaagcttcagctttttaactgtactcgcctggaccccaagttacgcaaaaataccttcacctcactggctcctctctccttccactgcacctgaaaaaaacatgctgtctcctcttttcaggtccactccaacctggtttctgccccagtgttcccctgaacctgttcttgctaaggtcactagtgaactccatgcagccattccagcggacactgtaaggtcctcatctaacttggctgttagccagcattcttgaaactgtcttttccattgctttccatggcacgcccactccatgctctcctccttctctgtggccaggcctcaattcccttgctgggccttgctggtcccttccctccctgtctctaaatattggagccatttaaggcccagttttggctcttcctctcttcttactctacatttcgtctgtagacaatcttattcacttccatggctttataaatcatctgtatgttcatgtctcctttatccccaccccagattgatcctctgagctccaggcccatacccaacttgacacatttgcttgagtatcacacaagtatcttgaactacatacacctaaagctgaagtcttgaatcttctacccatctgcctctccatcagtatgccccatctccatgtatggtacctccatccatcccatttgctcaccagcatcctccatatccacatcccccacttccagtcctgccccatgccacttctaaggggtaccttgactgcctcgttctttcccttttcattgtaccatcttagctcagtcatttcttgatgattccttgataccatgtgaccttccagttttattctggtggaatgttctatacttctactagtctataagctctttgagggcaaggaccatagctgtttggttcactggtatattcagtacattgtgcagcacttggcacatgttgcaagcttgatgaacatttatggaataaataaatggaataattatagttatgtaaaagctacatatgtgagaactagaaggaaatgtggaaactttaaaagagttggtgaaaatgtgatttttaaaaattctgatactcttgttataacgtttgagtgtgaattcaatttaagacatatatgtatacaagataagatgtgtggtgcggatataaatgctgcgttgaagattgagcatgaatgagagttcaggcatttgttgaagatgagttagtgggaatggtttgggatctttcactgtgctcagaattccctaaagataattgaactccagtccaggtgaagtggactgaaagaacttgccttcttccagcatgataatatggccagaactttttgaaaatgggaagataggggtgacctccggggactagattagacttagcaagcttatcaaagaaccagggagacagcagagtcttaggtggcagtgcctaagtctgggaggaagtgagaagtataacagaagacagagagctgccaggttgtctagactatggctcttcatagggggtgataaggttaccacttcctgcactcccaggttccttttacttagcgctcattcccatcagatcccatcatgcgcctgatgcaaaaggagtccactgttggcatgttaattcctataatttcccttctgaacaggacacctggctgccttgttcctttggaccatttccttgggaaaaagttactttggggacatttcaagattgtctttttgtgtccctactatacacacacacacacacacgtacaggcacacagatgtatccctgtacacatacaaacatacacacacaaaaacactccctccacccaattttgatcatatgtttgaccacaagcaaaaccttaactaattctaaagcacatttcacaggccaccttctttaatcattatctaacaatattagcaataaggaatagttgacaaatgtatcttcacacctaggatcatcaaggcacgctgtcttaaatgaaccccagatcaaagagaaacagatgaaaaaagtcatgtgtttggatgggaataattaatatcataaagacagaaatttttctaacattaaggcatatatttaatacaatttcatttagactcagtcccctcaacccctttggataaaatgaatatagatgaataatgctcaggaaatggtaagaaaattatgaaaatagagataaagcaggagagatttgccttatcagatgctaaatatatttaaaattacaggagtaaaaacttaatggcattggaatagaagtagatcaatagattattagagcagagcagagttcagaaatagattccagataaatggaaatttaatataggacaaaatgatatttcagttcagtgggaaaaggaggtttgtttttgtttaataaatggctgtgacataattgattaaccatctggataaagttggacccttatctcacactgtatataaaaataaattccagatggattaaagatataagcttaaaaaataaagcaataaagatgttggaacaattttatatttgtccataagctagagtttgggaagcactttatagccgagacaagaaaccctgtatttgattactcaaaagcacattgtgtaagggtaaaagatgccacaagcaaaagttacaagacaaacaatagattaggagaaaaatatgtgtcagaaatatgacagataaagattaatatctacaccatacagagagctcttgaaaattgataagaaaaatatacacacaaagcagaaaaatggtcaaagaataagaatatgctctttacagaagagcaaaccaaatagccaacaaaacatctattcttttatatttttatttatttatttatttatttatttatttatttatttatttatggaggcagtgtcttgctctgtcacccagaaacatctattctttacatcagctcttctgagaaattctccctcctgtggcaggtcaaagggtgagatcatatgaggctctatgatggatggaaatgaggcaaaaatcatcattttttccccatatcttccccgcacagactacagtgactatggtgggaagcttctctccaagacactcaaagtgcatggtgaagaatgtggactctagcagggagctctgccagaataaaagtcagcccaaccggacctgcacctgtagcatcccaaccagagcaacctacaaaggtatgtggattcttctgggttatttttgttataaaatcaaaaaaacaagggaacctcctgagtttagtttgcccaaggaatatgaatagttccccctctgtagactcactccctcactaccccctggttcccacttttgctctgggtcctcctcacctctggtttacctcattcatttactccaagaccccactatcagatatgcctggacaatgacaagagaagggcaagttggataggagagtgcagaaaagccagatagcactgggccgactacccaaatggtttagataattcagagatctgaaaagcaagaaatgccctgggtgagatgagaaattttaacaaccaatgttccatcagtttgagttcattgcattcatacatccatccaggaagtatttactgaacatctactatatgtgaggcactatgctaggtactagggatacagtgactcccccttgcccctaaaaaaaagactgtacactgggatagagagaagtaagtagctcattacaatgcagtgtgtaaatacagggaacatagagtaccatgagaagcacatgaaaaatgtaccttaccagacatggtggagggggaaggggtaaggaaagcttcctggaggaagtgatgtccagacaaggtgagggtagagttgagccagacaaagacgatggggatgggtatttcagacagagaccaacctgcatgatggccaggagacaaaaagctttatttgaagaaccagaagagcttctacatggccaaggcacatggggtaggggaaggtggaaaggggagacggagggaagatagataccaaaggaggcagccaggggaccatgaagggccttgtgaaccgtgaatcctgcgagctgtgatgaaacactgaaaggtttaagccggaggctggcagcacaatcagatttttattacagaaaggttccattgtgcattgtctgtctttcctgctggaatgtaagccccatggaggcagggacttggagaagacatcttcactgctgtgcttagaatagtatctggcacaacgtaggcattcacaatcaataaatgtttcttgaatgaatgaatggcttgaaggtggagaatggaccaaagaagggaaagactgaaagactgagttccaaaagatcacttggaggggtccaagtgagagggaaagtgaaagcggaaagctactggagggtccaggtgagagggaaagtgagagctggaggagaagccaagggggatggagagaagtggattcaatagatggtcagtaggtacggtgggcagactgaggactcctgagtctcttcgaatgagaaagactagaagtagagttgagttcatggagtaggtctccaggactgagtgatgatcattaatggagctgagtgggttttatggtgagagctggagttacccaatatcttagtccattctggctgctataacaaaataccttagactggataatttataaacaatagaaatgtattgcttacagccctggtgactggggagtccaaggtcaaggctccagcagattcagtgtctggtaatggcttggcctctgacttcgcagatggtgccttgttgctgtattctcacatacagaaggggcaggggagctctcttaagcctcttctataaggacactaatcacattcatgagggtgcagccctcatgatttaatcacttcacaaaggccccgtggcttaatactatcacattgggtattagattccaacttatgaatttaggggagacataaatattctgaccatagcacccaattgatcctaaatccttcaaaaggcaatttaatgcaccaggccagagaagtgagcttaaaaatgctctcagccactgggtggtggctgtttgggtctgattgcttggaaaatcacctcaattttccactttactttgtccacactgtgcagcctttgtgatgcatttctggttaattttgttcattaaaacgcagaccttgctcacctataaaatatgcctctaaagtatttgagatcactttgtaaagctagttggttgcttttagcgcctccatccgttgcacccaacccttcacctgccgttttctgaatatcttacatattctgaacgggcaaacaaatttgcttcccagcctcttgtactcagccagccggtgaccattgccaagcctttatccatggccttctttaaacctagaatggcttccccctttcacaaaatcctgtctccctttctgctttgaaacattggagaaaagtcacctcttccacatgcccttgccagattctgctctgactttctcagccattctaacacccctttggtcctccatgcacacccctatcttggcacccaggttaccagagggaactgaaaccactcatatggttgtttccttgactgtgctgtcatcacctaaattattttacctcttccagaataactgtaaatgctttcctagaagaaatcatgaatattcatttccttgtgatatttccaaatagagttttgtgcctatttggtgcttgaaaaaaagtatgacttttgcagtcttcatcaccggacacttatagattccactggagtgtattttcactgggagtccctctgagctgactgtccctgtgttcattctactcacatgtatcaagtgtctgttcagaggcttttgcagagaggtcatgccagccctccaagcctctttgtcttgagaacagaagatgatcatttcacacacaccctctgtacgtgaaccgaattttatgtggaattctgactttcagagggagtgttattgctgtggagaaggaccttaaagtaagggtttttagactttgggaaccacacactaataaaatttcaatgagaaaattagggttgccaacggagtcaagccagcttcttattttgtcaagacttagatttaaaaagcaccctctcggccaggcatggtggcacacgcctgtaatcccagcactttgggaggctgaggcgggcagatcacttgaggtcaggagttcaagaccagcctagccaacatggtgaaaccccgtctcaactaaaataaataaataaacaaacaaataaatagtaccacctcctattcctattaattcaccaaaggaaaaagatattaataccttgttattagcactggtccgtggacagaaggggatttgaaaggtgctattctgtgttgtggccccaaacctgggctctatacaattgttccatggggagcaatgcaaccacaggttcctgggtccaccccaggcttgctaaatcagaatatttaggggcatggccctgggatctatagctttgtaaatttctcaggtgattctgatagagaactgggtttgggaatcactaccttggatagagcatatatgtttaaagagatacaggaaatactacatttctctaatgctgatttagtagttttgaaatccttgttattttgttcttttggggttttctaaccaatgagtaggttttcaaaggcaaataagaaaacctttatcacagatttggtgacagttgaccccaagaagatcgtggaacccagcccatggaaactacactttagagtatgttaggtaaatatttgcagcgtggatttttctgaaggtgcaggatttctaatgctccggttttcatgttctaggcacttcttgctcggtgacttgttttgttcttatgccttggccaattaaaagctgagatagtgatccctaggagagtatgagatgtaaatgagctgtaaaatggcttcttcctagtgattattcatgggaggcttggaactcgaggtgggttcagtctgtttggaggcttgagctgtgcacttcggctgcctgatgcgaatggcctatggggaaggaaccacatactgattgaaatgttagcaaacagctggcacgctcctgcccactatgcagaggaagcaaaaatatttatctttttttgcatttacagctatgcttgactatagcaggactccaccgtaaatgacattttccccccttccctccagatgtttcagttgtcaacgtgatgttctccttcggttcttggaatttatcagacagattcaactttaccaactgctcatcattaaaagagtaagattttatttgaaatttgaatattctctcgttgatcttaatttacttatttgtttgactcctcgatttcctaaagaactcttttgtgagacagaactttccaaaatgccttttgaagcatggtgtaatgggagataggagagccaccgagctaataagctccgctcgcacattctagccctgactagtaagctggcgctgcgagggagagaaatcccctgtgcttaagtgttcatacccacagggaaatatgtcttcccaggaccgagaggcagccttgaagtaagtaaagaagaagggacaagccaggtgtggtggctcacatctggaatcccagcactttaggaggctgaggtgggcagatcgcttgagcccaggagagtttgagaccagcctgggcaatatagtgagacgccatcgctacaaaaaaacacaaaagttagccaagcatggtggtatgtgcctgtagtcccagctacttgggaggctgaggtgggaggatcacctgagcctaggagatggaggttgcagtgagccgggatggcgccccgcattccagtctgagtgacagagtgagattgtctcaacaaaaagaaggagcgctgctaggttctcttctgattggaatggcttcgggaatttgggcggaacgagaagccttgagtgtaggggtaaaaagtcttacttgagaaggacaaggtgaagtccctttcaccaaaagaacatgttcctgctgccccccttttcaccatctttggcctctttgagctacataggcccctgagttagtgccaaacctcactccttgcttctaaagcagcaagaggacagaggaaatatgtttctcagatgcctgacttgccaattggaagttgggatggaggcctgcagggcaccttgggaggctgcatgagtagcagtgctgtagatcactgcatagtttgattgaccagttatgtgagcaccaaatgggagtttcttttgtcctggcctgggaaccatggtttctatggggaaaatgaatttgaacttgaagctgagctaggaggctgctcttgaatgattagaacaggagcccctgggcctcatctcttccactgaggcactttgaaaaagatgacacaaggcccagttcaattattgctaagaaacagaatggatttaaggagaaaaaaatacaaaaattgctacagaaagcctcagaagttcatgaaaataggaaaaaagggtgtgaattaaatagaattatatagctcaaagacagttgaaagaacgtagctcccccgatgcccactttaaggccagatgaaaggaaccgactagccccaggtcccacaacttggtaattaagaaccagacctcagacctaggtcccccagggagggtgagcgccctttccataggtaactgcttcctgttaggaaagcacttagtacagtaatcacaccctgggggtagaagaagcgagcaaatcacaaacccgtgtctagctcacttaggtggccggatccacgcaaaagccagtgtgtcctctccttccacggaaactgcagtttctgtagatcagaatctcagaatgtttcctcatttcttggagaaggtataaaacaaactgggtcccccggccctgtgctagcaccccttgctagagctaaggcttcctctggcctcccttggccctgtttccagatcaaccctgatttccctttttaacattccttctcataagtgcttttcaagtcctccacagtttacccaatcatgataggtgatttgattagtagaaacacaattcttccttaatttgattataaagcaaacacaggcacctcgttgcctctgcttgccagctaacactttctgtctcacatcttccaggcagttggcagtgtgactgctggagtgagtgagggcttcctgattttggaaggcagagtgggtagaggcggggagagagagagatccatctccagagggacttacctgagggtagacaaatagcagaactggattcagaaacagattcattgggttcctattatctacagaccagcaggtgacccagcttcaggtttccatggcaacacccctgcaggtgccattccggcccatcaacctgagggcttccaagagcagggcacaaagcctcacaggaatgtctgtccagggatttttttttttttttgccttcttttaaatgcttgcatgccacatcacagagggaaattctaggatgtgaacattgtcctaaaacgcaggaattaagtcagttttctgtgttgctagatgcccagcatgcgtagaaactggctgcgcgtggtgtaaaagtgcaagaaggtgtatccaccccttcacagcttgcgacccttctgattatgagagaaaccaggtaaagtgacatttttggtattgtaagtcttaaccgccgggcatggtggctcacgcctgcaatcccagcattttgggaggtcgaggcgggtggatcaattgaggtcaggagttcgagaccagcctgaccaacatggcaaaaccctgcctctactaaaaatacaaagttagtggggtgtggtggcgcatgcctgtaatcccagctactcgggaggctgaggcaggagaatcacttgaacccgggaggcggaggttgcagtgagccgagatcgcgccactgcactcccagcctgggtgacagagtgagactccgtctcaaaaaaaaaaggtttaaccaaaaataaatgtttgtgactgcctggtcctaccttctcttttatgtttgttgcacactttgaatttaccacccatctggatgttgaagggatgttctccattccaggaacagtgtccagtggctgtcgagaagacatcaggaggaggaagacccaaggagaacaaggggaacagaaccaaccaggctttacaggtcagaccctatttttgtgtggttgaggggaaaacctgtctttgaatgaccatgaccacaactcatactactttgggttccttaaaaaaattctctattttactttctaccaaaattcccttttgtgtctttggttttttaaccaagtttcacttaattagcgcaatacatcaatggctggacactcacataaaataaattaaaactctgtaattatgaaaaatgatgttgctctggtcgaaataaaattgtaaaggtgactttgcggctcactggtgaagagctggaaggaagtttagcattccatctgagggatttcaacttgcactttatataattgcgtttctgggggttatgtgtgtggatgggggtctgtgcaaagtgtgcaaactaacctcgattccgttgttttttttcaactttgtagggacgtctaaccagtagtgaacactgctaaaccagaattgttatagaatgtgtatttctctcgccttctcacaagcagttattaatccatgaactttccttggaaatgcccgttattttcttcatagtaaattacataagcccccacgtcagtcatgtttgaaaagaggggacatgtcaacgtaaacatttctgggcggaacacatgtggctgtgcttacaacttcactcagtcaacaaaagttcattgagcatctatatgtggtaaaacacaaaaagaggataagtcctgccctcgctaaccttggagtctagcagaaatagacaaattaaaaatgacagctctggggagaaaagggctccattttccatttctctaatctgtggttttgacttctccacttgctgcttacctaaggtcaagtgcaaaggtaaataagtagcatattttgaatcattactgaaaagtttatagtaacttcaggtgaattaacaaccaggcagagggaatatgaatcaaatggatatgaagttaattaaaggcattagaaaagcttgatgctcaggtatctccagactttagcagtctctgaggtcttgttaagtaatgggctccttttctcatcccattggtttggaaaactaagacacagcgacaaggacttggatcaggaagacagtggctttgtggctttttctttttaattaaactttgttgttgttccagggtttgtttgtttgttttttcgttttgataaaatacacaaacaaaatttaccatttttattgcttttaagtgtacagttagttgaggtaagtacattcacatcattgcacaacctatctccagaactcttttcatcttgcaaaactgaaactctatgctcgttaaataataactcttcatctctccttccccccagcccttggaaaccgccattctaattttttgtctctatgaatttgactactctaggtacctcatgtaattgaatttgtctatttgtgctggcgtctttcacttagcatgatgtcctcaaggttcatctgtgtggtcgcatgggtcagaattcccttcttttctaaggttgactaatattccagtgtatgtatataccatattttgtttatccattcatccatggattaacgcttgggtcgcttccacattttagctatgatgaataatgctactaggaacgtgggtgtgctgctatttcttcgagaccctgctctcagttcttttcggtatatgcccagaagcagaattactggattgtattgtaattctctttttggttttttgaagaaccattgtaccgttttccatagcaacgataccattttgcattcccaccaacagtgcacaagggttccagtttcaccccatcctcaccaatacttgttattttcgattttgtttgatagtagccatcctaatatgggtcaggtggtatctcattgtggttttgatttgcatttccttgatgattaatgatgttgagcatctttgtgtatgcttgctggccatttgtatatcttctctggagaaatgtctaatcaagtcctttgcccatttttaaaattgggttatttttgttgttgttgagttgtaggagttctttatgtattctgggtatcaaccccctatcagatatatcatttgcaaatattttctaccattccataggtttccttttcattccgttgactgtgtcctgtaatacacagagtttttaattttgatgaagtccagttcatttattttttcttttattgcccatgcttttggtgtcagatccaataaatcattgccaaattcaatgtcatgaaactttctttctgcatttatttgtaaaggtctgtagcacttatattttggcctctgattcattctcagttcatttttatatatggcataagaaatgggtctaacttcattcttttgcatgtggatatccagttttcccaacatcatttgttgaaaaaaatgtcctttcccccattgaatggtcttggcaccctcgttgaaaatcatttcaccatatttgtgagagtgtatttctgggtgttcttttctattctattggtctatgcctgtctttatggcagtaacgcactgtttgattactgtagctttgtaaagtaaattttgaaatcaggaaatgtgaattcttcaactttgttcttctttttcaagattgttttagaaaataataaacttttaattttgagataattgtagattcacatgtacttgtgagacaataatacttaatatcttttacccagtttccttcaatagtactatcctgcaaaactatagcaaaacatcacagtcaggatattgacgttgacagcagtcaagacacagaacagctctatcatcacaaggctccccaggttgccctttcacagtcgcatccatttccctcctccctcccattctccatctctgatgcctggcaaccactgacctcagctccatttctataattttatcatttcaataattttatataaacggaatcatccagatgtaccctttgggggactggctcttttaactcaacataattctctggaaattcttccaagttcttttatgtatcaataattcattcctttttatcgctgagtcgtggtccaggcagcggctttttaaacttctttaattttaaagataaatatcataaagtcactacctcctggtttcctgcagtgtatctctctgcaccctttgaactgtgtggttaaaaggactggggtcaccacaagagaagaagaaggctgaaaataaacaaaagcccagatctgtttttagtgcttctctgtggattacccctctaagtgtggagaaagacattttgttgatactgacatgttttctttaaatatgtgactcagagcagaatctctcttttgtttgatagggaatggagtgttatttgtcacaggagggatttctcgtgctctgtcaaacactgctgtctttcattatcaggtggaatgtgtaacattctggtttccactttgggccttcatgttggccttgaacaaagcacccaatgtctttgtgattctgtttctaccagagaagtcactcacagctttgcttcaatgcatctgcccacaccacatatgtactgagtacttcctgtgtgctaggcactaggaatggagcaggtactgtcctaggcgtctaggatcctgaacttgagttgattctttctagaggcatttattgcacacctattagatgcaagtataccgacctccacagattccatgaggaggattcagatgaatcaggcacatctctggccatcagtctcaagaatcttatccatgagtacatgagtaaaaatacaagattttaaaaatattaatatgaaggtacaagaaagtacacagagagcctctctgtgcccggggctttgtcttagtccttcctgtttgcttaaacccagtgccttgaagttgaaaacacttaatcagtgtggttggttaagtctttgattgatggatggattgattgctggagatggcatttcagcccacctttgaggacgagaagcatccagacacatgaatgcgggtatttgaagcagaggaaccagcatatgcacagtgtaggggtaggagccagaagattccaggacacacgctagaggaaaccctaagtaggcacagaggatgcaggaaattatgagacacaaggttgaaatgaccctggagcctgcatatatagggcctcacataccagtcctgtgagtgctcgctttattcttcagtggcaatggaatgccattcaaggtatcttattttatttttttagtgtatgagtttgctaatccaaggatctggtacttatgaggtagggtcctggttcagtccctactaggccagtagccctcacactgtttcatgaccccaagacctactcctgtatcctgaccctgaaacgtatagcgtcatctgccaagggggctgagttacagaaaagtgtgaccacaatagagaaatgagctcaaaaatctatgtatgaccttggaggaggagtatttcaagctataaaggccagtgtctgaccgtctgtctgtttctttccacatatctagtagttgaaaccttgtcagggaccgttggcccttttaccctgccctgaccacttctccttccatttcttaacattctcatatctggtgccttcactcactgagaccagagatagttcccctctcttttgtgcattcaaggagagattgtgaagatttatgatatgatgtcattctaatatttgttattaccctcaatatgcttatcactatagggcagaaataaagcatacaaagtcatatcccctggcaatttacattcaaatggttctttctcttccttgcacctcctcttctcttcctccatcacttcttcccccctccgagatggagtttcactcttgttgcccagggtggagtgcagtggcacaatctcggctcactgcaacctctgcctccccagttcaagtgattctcctgccttggcctcccaagtagctgggattacaggcacccgccaccatgcccagctaattttttccaatttttagtagagacagggtttcaccatgttggccaggatggtctcgaactcctgacctcaagtgatctgcctgcttcagcctcccaaagtgctgggattacaggcatgagccaccgcacccggcccctccatcacttttgaatatgcatttttgatctctcacaggcaatccagatgaatgcttttggggaccttgccttcaagagtgaaattaaatttcacatataccttgctgagtagcttctatgggcctagcatagagccgggtactgtagaattaacttacaatcattcatttattcattcattcaaaatttgtttgctgagcaactactatgtgctagacaggcaggcaaagtgtgtgactgcatggagcttacatggtagaacttataatattttggaggaaataagattcattttcatgaagcagttgcatgtgcacaagagaaaaagatacaagagagaatgccagaatgtactcaaatgaacagtggtagctaagattcgctgagcctgtgccatgccctgagctcagagtatctaagcctcacaatggacctattttccccattttatagataaggaaattttagctcagagagagcaaatggtaggtaagaaatatgaatccaggcaatctgactcaacagagttttaaccattaccctacattgtatgccctaaattgaatataaacattggttaaaccatactactgatgatattaataaaagtcagtctggaaaggactctaatattggcttctcttggcattagactgtcaaagcctgcccccgatccatgccacacatgtagggtgggagcaagacctccaacctggccaggatgtgggaggagtgtattaacctcaaagacatgggagaaaggggtggggcagggtgtggtccgagggaaggagtcagacccagacacggctgggcatctgctccaagacagggagagcagaataggcttagtgaggcaactgaggccctggggagaggggagcagcaagaatctcatgcatgagtcgaatcttggccaaagggtggactttgaggggctgggtttaaattagaatcagggccctccactggctgggaagagctgccctccctggccctggagttttggtcacccagtccaggtctggggagccacactcagaaggctcaaatgccaagaggaatagcaggttgttcggagggtgggcttggcagccaagtcagcctccttttagagtctgcagctcagagaagtgagtcttgatctcttcgcacagggcattggtctgtcaccttctatctggaagtctcaagctctgtgtccagaggcactgctcactattggcatttccagggccaactgaaatcacatctcaagttccctggagcctgtaccgaggggcccccgtgaaaaggcatttgtcccaggggctaagcatcaaatggataaccattttgttccatttcacactctaatttttcttgagtggacctgtattttgctattttctttccatatctcacctccttttactctttcccatttccacggctggttaccactcttaccaatttatacatttcattaatatattagttctatcctcttctcagtcattaataaagatgttaaataatcctgaaccgaatactcactcctgtagggccctacaggactctttcctttaattagttgtgctacctttcatctatctaatgtccttcggtttcagatttccagctggttttgaatccatgtgactttttatctagtcctgtttgaactaatttcatgagtgaaaatccgagagatgttttactgagtgttgattcaggtccaggcctacagagagtttgctatattcagatttttttttaacagattaatagagtacaatttggccttaataaactgagccctcctaatgcacctctttccaatattcttttcaatcatagcagtattttctccattaatgtcatggtaatttgaattgtgttgacgtcagacttcacaaaaggtactcttactgtcagaagtaatcctcttagaccttttgaaagataactatttcttagtggttgtgctatttccaatatcctataatgacttagttaaaaataaaaaataaaaaggatcgggtattctataaatctcctaattaaccagcttctaatgtgctttcttatacaaaacagggactgaaagccagagctcatagtagtttattaaataagttcaaattgtgcagccatttaaaaataaccctgaagtctttaaaacgtaacctacaggaagcacactattctgaggttaattgctggacaacatagggctgtgacggttatagtcaacggtattttgatttgaatacatagaaatccttggacatagagtgagggaggaatcccacgatagggctctaagaatttgtctctttgtattgagctcaattatgttttacaattaactccctctaaaatgcataagcttatagggctggctactatatgccaggttttatgaattaactcttgatgaaaatacaaaaattgatctaaaatattgaatgtgtagaacctttatggggaaatgattctttgctcttttgtctgtactggatttttcaaaatctttattggtaaaaagaaagaatgtatttctaagaattgttgcaaccatacagggcagccatggagctgactctacattttgttttaaaaatgttgttttatacctgcactatttatttaggagggtcctcttggtagctctttaacccatttattaagattagaagaggttccaccagcaaacaaaagacaactaatctgagtctgtttaaaagcagactgaagcacccactttcacaagacaggccagggctggattccatcctagatggccaagagaaccctctctaaacaataggggtttaaaatgtttttgaagtagcaaggcggtctccactcagggaaataaaaagttaataagatgatgtggcaagtcctctgatggtgttcgtagagccatttaaggagcaaaatataacttccttaaaaaatcttttttacattagttgtaaggctctctttatcctctgcagagaatggagaagaagcatttacttggcatgtttgaaaattttgcttgagcagacatcaacagtataaatataagaagcaggaaggactatctagaaagaaaagaaacctgggaatcatagttgacttggatgtaaacgtgagtctgcaatgaggtttacataaaaaaagaaaaaaaattctatcttgctcccctaagaagacagtggactcctctagagcagaggtcggcaaatgttttctacaaagagccaagacagtaaatattttaggctttgcgggccgtatggtctctgctgcagctactccactcgactgctgcagtgcaacagcagccagagacactacccagacgaatatttatgggtgctgaaatttgaatttcatgtgtttttatatgtcatgaaatattattcttcttttgacattttgtcatggcccatacaaaagcaggtagcgggcaggatctggcccacagactatagtttgccaactcctgatctagtgcacacatagatcatgtgtcccccacaatatctggcctaaggaccctgtaggtgctcaataaacacttgttctcttagctgtcaccacgtaagagcgaagagtaagccttttgctatataacacacacttgacatttgcaagagatttatcttgaaggctttgctaatccccccattccaagtaccactctagcagataatttcccccataaaatgcagtcaagtataacagaataattaaagtgaccctttcaggcccttagtgattctattaatacagggctaacgtccttcacaaagtgattaaaataaattctgctaccaaaatcaattctgtgtcatgttacatcattgctgtgatgacattaacaatgaatttacctcaatctgcaaaaccagtccaaagcgctgatgagtgatggggacgactgtgccgtgtagcacctgtgtgtgctggggagcagaatgagaaaatgtctgtttgagcaggatgggcagcccctgtagcccagcaatgccaccccaatgagtgttccatgtacaaaggagcagaggatactcaattgcttcaagaagcaggtgttaggcaggtgttggacatcacggagttctcccagtggctcaggggcttcttcctggactcggtcctccaagtggatgcactcagcatttagaatttcaccaaacgtcatgtgattaagcatctctggactttggggtcattttcaaatatcaagactgagtatattctgcgatggtagaggatataggggaaaaaagagtgtgagtatgatgttcactcttgctgaagttctgctggactttatattgggtagaatcttagaatcttatgtcctgttttggtcaccgtattatagaagaatacagacttgctgaaaatggtctacaaaagaacagtgaaattatcagaatgatagacagtagcatctgtaacataaaagtgaaagaactcaggattgttttatcttgaaaagggaaaatgattcttgctatcaaataaagggctttttttttaaagggagaatttgattagatatcacaaatggagaagtaaggtggcattcacctatatggtatgaagctaggtagcaagggactccaagggacatgttcttgaccttaggcctgataaagtctattgaaactgggtagcaagaaggaggttgtggtatctacaaaccttggttggccacagtggtttagacatccaactacttgatagtaggtgactgaacaggttgatttcttgaggtttttccccctgcagtatcctcctggattcaaatagcctcactgtaacaaaaatatgactgctttcttgggaactgaatttatctggaatgacatttatttcaacttaacgatgagtctgtcattggcctacggtcaatggactctctttcttttccttgattttgcttacattgtgagcctccagaggctgtaaggcagtaaacattttcaaaactctagtgatacctcactcttcagacagaatatcagacttttcaactgtattttcaactgtcttgtgagacaaagactaattggtttgacctcatgctgtcacatgttgagagacatgaatctgcagccctcttccttgaattcattgatttcattaaacactgtctgcttgtgttcgcaaaatgttgtaatttcccagtgatttcttcgaactgcagcgtataaacagatttttttggagcgatgccatttcttagctttgatctcctgttttaatcttttctttccaataggtcttctacattaagtccattgagccacagaaagtatcgacattagggaaaagcaacgtgatagtaacgggagcaaactttacccgggcatcgaacatcacaatgatcctgaaaggaaccagtacctgtgataaggatgtgtgagtcgaaatactaataatttatcctcggtaacgtaacgctcaaacctgtgccaaaggaatatcagtgtgattataaccttaatatagtcaaattattgccatgccccaaagcaggccaattagtcagagtatttgacataatataattccaacacgtaaaataattttcacaacagatctgaagttcattgtgagagaatctgttctgtgttattccccaaaaatctcagtatatagtcatttcaggatgttgcctgtttggggtcttgattcattttcagtaacaaaatcaagtatatggagtagcaaacatcattctttaggtgatgcacttggaaaaatagttgagtaccttgaaatttgatgaggaattttttggagcagctcttccagtgtgccacccaaagttgaaaaaacaaaacctcttggatccattttatgtggacattttattctttgtagccttctctttactggtttggtttcagcctccaaaaattaaattactactacatataatggtagtaaaaaagaacaccccaacataaatatctggtcaatgtatctcttgaacattattatttctgtcacttctttcccaaactcatcacatcggtgaaacttggagaaagacttttcaatttctaccgatgtccttgtgcaaatggttactcccccttcgaaaaaaaaaaagtgatgtgataactgcagttattaaataacacaacagattatttgagttttctgcttgttaactcatataagtttgggctaatttgaagtaaaagatgttacagtctacatagagtataatactaagcttattttcatcatggaaatgcatttaagacaatctgctgaagcgtgatgttttgatttttaactactaaaacagatttgtacagcattctaatctgctatgcttatttactgaattttcttctttaattcattttctgcacatcactgccatgcccttcccctcatagcagtaaatttggaatatctgtgatcttgatgagaaaagctgctcattggtggcttgcctgtgttctgctatttgccagaattatcaagcacacattagaggctgtatctatgcaacataggtttttttgtgctgtttatcctggctaaataccttattgcaaaaatctttcattttatgtagcgaaatctgtgaagttagacacctgtgtattcactgaaaggcaatcaacttcatggaaaataagtagtttttcggagcattaccctgtttctgactctttatgttctcattttaattccgaatgtgtcttgagatactgcagttattaaattaaatgactaggagacctttctgcatgtcgcatttcagtaaccacatctgtgtggtgaagccaagttcacaagcagtcaacataatactcagttaatcctatacctgagcccaggctgtaatcccaagctcttttaatatggtacttttaaaatgggtaattattttaaagagaaaaatactagtagtggaatgacctacattttcacctctcttcttctgaaatttataaacaagtttgaattttaatgttcaaccactttatgataaatttcctagagctttgctctgaatataaacctgaaaatgtgcgtctgaggtggcgtaagtacaaactgactcagatgtttttgaatttgccttatcctaaagggttagtgatagcattaaagttaatcatcatgcacatggcctttaagtagtaataacagattctcatgtagcacggttatactgagcattattcagacacaacccaggcttaatgatttgtgctttagaggatcattgtagacacacagaggaagctgcaggtgacagcgggaatgtcggagaaagcttcgctctgactctgaaagggcgccaagcatcagctgttggacatcaggagcaccctggacagccccagctaagtcccagcctggatactccttagggagcatgttggccccaatgctgattgattctgagatgcctgggctcttggtttaggccccctttgaacagcagaatttccatctctgtctggtgctgtgttttaccctctcagtgcttgactagggctttttttcttaagctttttattatggaaactcaaacataatacaagagagatgagtgtaatgaacctctctgtagccattcccggtttcaaagcctatcaacattttgccaatcttgcttcatctatcttatctgggatttttgggggggcatgataagaaccaaacaccatatccttcactgctaaatacttcagtacctctctaacagataagccatagtgccattatgatactcaacagaattatccacaattcttaacataatgtaacccccagttcatgttctgctttctattagtacttcttcagggcaatggttacacctccttcctttcccacttctaagggcaatgcaaataagaaagataaaaatgtactaaagaaagaggaacccaacccctaataataccaacttgggtcactggcccctcatgagtcagtagttgcctgcagctgttctgctccttcatgaagtgttgtagttcaagtgaaattcatttgctgtcaccttgggtaatcaactgtgctaagtgtctgtgtcatgtgagagttctttttctactcttttctaggatacaggttagccatgtgctaaatgacacccacatgaaattctctcttccatcaagccggaaagaaatgaaggatgtgtgtatccagtttgatggtgggaactgctcttctgtgggatccttatcctacattgctctgccacattgttcccttatatttcctgctaccacctggatcaggtactttctagattcataatctttttctcattgtggttaaaggtcatatgcccaaagatcattgattttattcaagtaaattcagaaacagtggtcattccaaattcctctcaccgagttctccttaggatttactcctagaaaaatgcatacctgacaagacatttgcttcccatgctcatcgtgaatgctatgagcacacctttttcccttcaccatggctgctgagaaactcacagctgaaatgtttgcctaggtttttgatatagatatatgacactctttactatgtgtccctcctgcttgtgataaaaggcttctttcttacctctttcattttatagactttagatactttaagctgttttgaattctttgggggaaatattgggagctatcaaaatgaaaagcagaatcaaccttttcaagatgttccctaagggggagatggaaaccccaaaataaactctcccagataaatccaatatgttaagaaaaacatttatctccctagttgaatttttaaatttattactattatgtattttttgcattttcatgggtacataatacttgtacatgtttatgggacacgtgatgttttttctatgatcatacagtgaatatgtaatcatcaaatcagggtaattggagtatccatcacctcaagcacttatcatttctttctgttaggaacattccaattccactcttctagctatttttaaatatgcaataaattattgtgagttatagacaccctactatgctactgaacactagatcttattctatctcattgtatttttgtagccattaaccaaaccctctttatccctctctggccccgccacaccacccttcccagcctctgatacccataattctactctctatctccattagaccaactttctcagctcccacatatgggtgagaacctgcaatatttgtctttctgtgcctggcttatttcacttaacataatgtcctgcagttccatctgtgttgttgcaaatgacaggatctcattcttttttgtatgctgaataatactccattgtgtataggtaccacattttctttatcctctaatctgttgatggacacttaggttgagtccctatcttggttattgtgaagaatgctgtaataaagattcctcctagttgaatttaaattcactttcataatatttttattcctaaatctctttaggactaaaatcctaacgatattttctttgcctgacacagtacgaagctaattttcaaagtactctctaggtaaacctacagacaaaaagctttgttaaaaaaaaaaaagaagaagaagaagaagaaaaggaggggaagagaaagaggaaaaaaagtagagaagaaaaaaatcacttttaatattcttatttaagatcaagtgagaggtggctatattagtttgctagggtggacataaagtgccacagcgtttgtggcttaaacaacagaaatttctttctccccggttctggaggctgaaatcatggtgttggtaagattggtttctcctgaggcccttacaccttggcttgtagatggtcatcttctctctatgtcttcacgtggtcttccctctgtatctctgtcctaatctccccaattttttttttttttttttttttttttgtgacagtctcactctgtcacccaggctggagtgcagtggcgcaatcttggctcactgcaacctccgcctcccagattcaagtgattctcctgcctcagcctctctagtagctgggataatctcccctttttataaggacatcggtcatgttggattagggcccaccccagtgacttcgtttaaccttccttacctctttaaccacccacgtctctaaatacagtcccattctgaggcactgggagttagggcttcaacatacattttatggggacacattttatggggacacagttcagtccataatagtaagataaggagaactgaaatttcaaaaccaaggctctagcatgacatcccccactctaggaccaattccattctccatataaaaggagacattgatgtggcatgccccatgtgcctggtgtgttcatctattgactaggttaatcctcacaacaaatttatgagatctgctatggcttgtcccttttgcaaatgagggaactgggggaggaaaagggttcaaacaactcaccccagcctcccagacagctggtactaggaggttgggctctgagccacagcagtatcctgctttgctataaagtaagaggctccctactgttctgtcacctgcgacattctgagcctgtgtgtcttggctgctccttggtcactgtgccttgagcaagaatgtggctctaaatgctggccatcgggagatcacgcttggctcggttttctggtaatggctacagactggcatgaggccaactcagcccttccccattgtggctggaggattcagagatcagtgtcttctctctgccctacacaaattgggttgctcaggcccacctcctggtcttgtcatcaggggctcagctggctgttggacctgacgtacccaggctcttgtcccctagaatgagtgtctggtgacctacgtgaacaggggtgcaagggcagacagagctgtggacagctgtttctttcacacccagtgaccgctttgcttatatgcactgagaaacgtgaagttatttggcctggttttagagagatggaatgcagctgttatttatacggcgtaccaaataggaatttacactttgcatgtcatctgtaattctaccttgcccaaagtgtttcctgtctctctaaataacataccattggtaggttaggagtttgattttgaaaattcttagattgaagtctctttatatagattaaacagtaatcaaacaaaattctgtttagtgaaaccttttcaaggtacagctcctgatctgattatatgtggcgatatgacacaaacaaaattcaaattccatcaaagaatctgggcattttcctagaattaaaataggatctgacctgaatttttatatttatgcatcttgaaacccatgaatttgtggctggtatcctgaaaagattcccaaaattgtcctgtatttgaaattaaaattcattaatttgctctcaaacataattgggtttaatattaaacatgaataaattgatagctttgttcataaatgcaaaatgcctgtgtgttagctatgaaacccttattgttgcttttattccttgcagtggtggtcaaaatataaccatgatgggcagaaattttgatgtaattgacaacttaatcatttcacatgaattaaaaggaaacataaatgtaagtctccagctgctttgtaataatagttgttttcaaggatggttctattttcatcacactatgctatgttgggggtattttttgtttctgtgactttggtgttataaacttttacctatgctatcatatattctatccatgctagaatggaaataataagaccttatccttgtagctgagtatttctagttgcagcaatgaggaaagagaaatgaacttggtacgataagacctgacattttctttttatgtgatttgtggcaagtcaccctaatgaggcaatgcttatgaatatgtgtgaaaatgctccgtgaatggttaaggtgtgatataaagaattgcatttctgtgaagagtaggtggtattgttcccattgcacagagagagttgggttcacagaggttagatgacttgccaaggtcccagaaatcttgtcatgtgcttctccttctcttcgacccaatttgttccctaccatctgatgtcaccttctcttacctttcgtctccccacaggagaaatggtaggaggggtctggtttccacctttgcccgattctcccactggtgcctccagatggggaccctctagagcaggggtgtcaaccttttggcttcctgtggccacattggaagaagaattgtcttgggccacacataagatacaccaacactaacgatagctaatgagctaaaaaatggtttgtgcataatttccgtgatatccaccaccacagataagcaaaaaagtcctcacattcaaaaggctggacacggctgctctagatggaagcttctgatgccaagaggggagatgagggatttcacatacaagtcaggcctccaagtgtacttgcacacacttctaaatatccttccccattctttcttcccctttttccctctccttgatgagatatgtgaggtggctgcctctctggggccctgcctgaccacttcctgccaaggctgacacactccctcctcaggagcagtgtgggttcagacccaaattccgggggccgcctgataggccgtccttacagccttgtggtgcacacattcacctgctgacacagttcagagccacttccaagcctcacactgtatctgactccaggcctcatctccatggtgtgaacacctccagttgaatggctcgtatagtttgaccctctgagcagaggcattacctgagtttgtcacggacttgctctccctcctacttgctgttcccaaatcaagttgaattttttgagcacctactgcaggcaaaacattttgctgggtgcagggacaaaagataagtgagatagtcatattgccttcatggaggcaggcagcaaatctacattgggattgaaagttgaggctgggtgtggtggctcacgattataatcccagcactttgggaggccaaggcgggaagactgcttgaggccaggagttcgagaccagcctaggcaacatagtgagacccccatctctataaaataaaaattaaaaaagttgacagcacagagtatcatcaggttctaggtcctctggttccctaactgttcagaaaccctgtgagtccaagaagacaccatttcttttcacattaaagagaaattaaacatgcatgggattaagtacgcctgcagtatggagtggggtgggtggaagcagggaggtgagttcaggtacagaggacagagtcctcgcaggcccgtgctgggaacatcactcaatcctgcttagtgggaacctagagggtgggtctggaatgaccaagagcgatagctgtaaaactgagctggggccacaaaaagcagcgtcagactgaaaactttgcccttaattctgtaggcagcagggagccactgaagatctctgagcaggaagtgacataggtctaggtacactggactcacactggaccgagacaattagtgacaatgaaagcagtcagaaggttaccaatgggaaaagagactatgcagaaagcagtagactagggaaaggggaggattctgacccaaaaggcttcggtgtcctgtcttgagtcctgggaaaccacgagaaaagaagagagtgtccaacccccagcaggggccagctcctgaagtgcttgttgccgctgaatcactctttgttggggaacctcctgcagggcggttattattttggcaatggtgcacagctgagtttggagaggcaggaactgaagaaaggctgggagcccagtgaggatgctcatgccagtgcaggtgtgtctgagacgtccacagtctctctgggctgacagtagctccctttgggctgtggttagcagagcaggtctcaagtgctggggcatcgtgaagctagagatgaccagcttgtctttatagcagtatcattgaagggagagtgggggtgacatcatgggagtgagagcacagaggaggaagaaaagagcacctaggactggtggcaaagcttcattttaaggaatgacagacagtaggatgggccgtgaaggtggccgagaaggtgctcagaaaccagtgaaaaagagtaaatcgcatggcgcgagtttgtcacgagtatggaactgtagagtcttgaggataatagggttgggtgatcctctcacctgcaatccttctagaaggcatcttcagtaaaaagccagcctgctaggagttaaggctgctgaggcagtagagacagtggttttcatcctgaggacagaaatgtgagcaggagattcagggctatagtttggaaagatgtgaagggaaaggaaggttgtgcttgtccaaatctcagctctttacatcatattttcccaccaattgcctcttcctattgtcttttttatgctctagtatcagggggtggcgggggtgggggaaaaatagtttttcccacctgataaatttctttttatgagttataattgcttttctgtagaatgtttgccatcctcccctaacccaccagcctcctctgcctgtccttctgtacacctaaacaggacaatatatttatgttatgtatttactaactttttaaattttattttttatatatatagagagagacagggtctcactgtgttacccaggctgatctccaactcccgggctcacgtaaccctcctccctccgtttcccacagcgctgggattacaggcgtgagccactacgcccagcctatttatgtgttgttgtttttttttaatcctgtaaatcaggccaccttttttgcattgttttcagttttcatgctcttcatttcatgggagatgcattgttccttttacttttgttttctcctgttttctgttatgcctgaaaacccttgtcctccttgtgtctagtgacttctgctaaggccctgcaggaggttcccccaacaaagggtgattcagctgcaacaagcgcttcaggagctggcccttgctgagagttggacacttttcttttctcgtggtttcccagggctcagacaggctgaccccaaggacacctaagccccttgggtcagaatcttcccctttccctagcctactgctttcagcctagtctcttttcccatggcataaccttccagctgctttcattgtcactcatgatattaatcataatattaactagcatgttttgagtgcttactgtgtgccgggccctgatctaagcatgtataatctcagttaacgtagccctcatttaatgtaatgtagggtgaagtcaatcctgtgagggaggtagttttgctgtctccatattacacatgagaaaacagaagcaccaagaagttaagttgctcaggtcacttagctcttagagatcacagctgggattcgttaacaaagttactaaaacattcttttctttttgtccaggtctctgaatattgtgtggcgacttactgcgggtttttagcccccagtttaaagagttcaaaagtgcgcacgaatgtcactgtgaagctgagagtacaagacacctacttggattgtggaaccctgcagtatcgggaggaccccagattcacggggtatcgggtggaatccgaggtggacacagaactggaagtgaaaattcaagtatgtttcttttctttctgggtgggatgtcaccccgaccccttgactggaaaggtgtgtttatgctcgtgagtttctacatgtgctctgatttctccatcttcattttgttctttacagaaagaaaatgacaacttcaacatttccaaaaaagacattgaaattactctcttccatggggaaaatgggcaattaaattgcagttttgaaaatattactagaaatcaagatcttaccaccatcctttgcaaaattaaaggcatcaagactgcaagcaccattgccaactcttctaagaaagttcgggtaagtgacctggcagtcccacctgctgtctttacctgatttttgtgataattccttggctaaaccagaggccagaatggaatctttcatggatcttcagatcctcactttaaatagaagataaacaaagctggtactgcgagcccaagcaaaatagctccaaaatagctggctgaatccatccctgtgcctgttcgaacgtcaaagcgttggacacaccattgtctataatcctaatgagtcttgatagcttttgttctagccacacatttatacagtaggatcggcaagcaaaatctctagacccattgacaaatgagctgtcactcttttctcaaatgcggaggtgacatgtcttagcagaaacccaaaacaaacaagggcctcttcagcacactctgggtagcattagaatcagatggagaccagataatctctgggtcatgggctgcttccttcaccatgaagtcatactttctgcgattaatcttttcccagatatgtttgggggacggatcactgctatatttatatcccataataaagatgtgagaccactgagaagggaaacacattagaagtcaccctttatagtattcatgccgtatgaggctctgtacagcctatataaattcttcttgatctatcatcataaataattggataaaagacaatgcaaaagaacttcagactggaaggcaacaacaaaaatgtgttcatgtcccactggcaccagttaatagctctgtggccttaggtaaatcacttgagtttcctgagcctctcttagtccatctgtatgataaatggggttaataataagttttatttgtttttttagacagagtctcactttgttacccaggcaggagtacagtggcacgatcttggcttacagcaacctccgcttcccagttttaagcaattctcatgcctcagtcacccaagtagctgggattacaggtgcgcaccaccacacctggctagttttttctatttttagtagagacggagtttcactgtgttgggctggctggtcccaaactccttgcctcaagtgatctgcctgcctcggcctcccaaagtgctggcattacaggtgtgagctaccgcgcccagccaatagtaagttttaagtcaggaataacaactaggctgggagagacaactcaagcctataatgccagcactttgggaagccaaagcaggaggatcacttgagcctctagaagtctgggcaacacagtaagaccctgtctcaaaaaaaaataaggaacaacaactcaactcaccagtgttcccacctttcctgttagttgagaagagcaaatgctaacattcttcatcattcatgacatagctcctgagagcctacgctgtgatggggacagacagagaataaaacagacaaaaacatctgcctttatggaggttccctaaagagacacagcgtgaagaatataaataaaaattgtgttacttggtggcagttgctatggagaaaaaaagcaccagtgtgggggggtgggggggtgggaacaggagcaggtaggggggccatgctgcaggttttgcaacggtgggcagaagaggcctgcttgtgaaagtgacatctgtataaggaggagtgggaacaagccatgggctatctggggtagaacgttctaggcagagggagcagagggagcagaggtcctgaggcaggaggctgcctggcatgtttgaagagcagcaaggaggccagtgtgactggagtggagggagcagagcagaggcttctgaggttagagagttcatggagacaacaggagatgattagaaccttgtggaccatggcaagggcttggcttgtgggctgcagaaggcatgggagagttttgaggagggcgccatgagctgacttattcagatgacgtcatgaatttagtcaggacagcctaccaagaggcactcccaacatcccatttcagagatgaggaaaaagaggactggatgtgcatacctaattcagggttccatagctgagaaacagagcaggtggcagagctggtatggagagcttcagctatccgggtccaaatccatcctccagctactgtgctcagatgcctccacgggggcagcatgagtccaaggatggaaacacgccttaatacttgtatgtacatcagtgaaataattaagcttcatgtagagtttttcccttgacaagtttcacaaaatataacccaaaaaaatgctaaaactggaaaaatccctcagggatgatctgatcagcactgccaatctggtttttgccacagaatgttttattcaaaataggatgccaggtacagtggctcacacctgtaatcccagcagtttgagaggctgaggtgggaggatcgcttgagttcaggagttcgagaccagactgggcaacatagtgagaccccgtctctacaaaaaatttaaaaattagccaggtgtggtggtgtgtaccgtagccccagctacttgggaggctgaggtgggaggatcacttgagcccatgatgagttcaaggctacagtgggctatgatcacaccactgcactccaacctgggcaacagagcaagactttgtctctaaaacaaaaacaaaataagcctgcctgtaaaaatgataaaaattgagtttcttccttagaataaagggcaggcaggggcttcttgcctacaggttactactgcctctttattgccctcactcctgcaacttaaaacccccagagcaaagagggccaaaattaagactctgagggtctagtccagcatgtgtcaactgacatttcaggaaactgaggcacagtgaatattctggatttgcccaaggacacatagctaatctgccacagaaatgagagttgaactcagatatcctacccagctcactgcttctttttgtattgtgaagccattttaggggggaaattatgtaaataaatacagtccccaactcaattgggtctaatgacattctttgtcccatcaggtcaagctgggaaacctggagctctacgtcgagcaggagtcagttccttccacatggtattttctgattgtgctccctgtcttgctagtgattgtcatttttggtaagtgccctgtttaattttgtcagagaaattattccctggggcctctcgccgggcaggcagactttcagctttcaggggctgtttgcttcaattaagtataaatgggtgaaagcccaaatcaaaactttgagaaacgaataataggtacacgctgagggctttctaaacatttcttttggccaggcgtggtggctgatgcctataatcccagcactttgggacactgaggcgggcggatcgccttgaggtcaggagttcaagaccagcctggccaacatggcaaaaccccgtctctactaaaaatacaaaaattagccgggcgtgatggcaggtgcctgtaatcccagctactcaggagactgaggtaggaagaattgcttgaacccgggaggcggaggttgcagtgagccgagatcacaccactgcactccagcctgggtgacagagcaagactccatctcaaaaacaaacaaacaaaaaacaaaatttttttttaaaggatgcttcattaatagaaggctggattacacagatggtatcttgggatttgagggatataatctactttgcttctccattccttcaaattgtggtgacaaatgttcatttatgtaattccccaagaacttctctgggattttgggctcccaggacttggttatttcatcttgaccaccccccaccacccatcaccccagcctcatttcagtcttgattttctgggcagaaccacactttagaagtgtggtcatgcctgggcacagtggcacacacctgtagttccaacactttgggaggccaaggagggaggacggcataagtccaggagtttgaggttacagtgagttatgatcgtgccactgcatgccagcctggacaacagaatgaggccctgtgtctaaaaagtaaatgattttttttaatagaagtgtgatctatgtcatctcttaaagtggtcccgggcccatccacacacagtgagcccatggtggttgctcattggccaaatctggtccaccaatatattttgttttgccgtgtagcattgtctaaaactattaagtagcttataacatttaaaaattagtgattcacatttggaaacgtctcttgaaaatgtgaaagatttggatcattggatcccaaatttccatagcatcagtttattagagctgagtagcagctacgccctagagagagggaatgtgctccctaggttttgaccacagtcgccaccactccatattgtctccacctaggccatttaactcatctatgtacctgatatctgtagccatttcgtttgtgactctggttctgagctgcttgtcatttgaagtctattttctctcatccttctttgaaaaaggaactcttatccaccaacaaatagcactttggctgggcccggtggctcatgcctgtaatcccagcactttgggaggctgaggcgggtggatcacgaggtcagcagatcgagaccatcctgaccaacatggtgaaaccctgtctctactaaaaatacaaaaattagctgagtgtggtggcacgtgcctgtaatcccagctactcaggaggctgaggcaggaaaatcatttgaacccgggagctggaggttgcagtgagccgagatcgtgccactgcactcccgcctggccacagaacaagactccgtctcagaaaaaaaaaaaaaaaaaaaaaaaaaaagcactttgtatttcctgatttaacataggtattgactttctgaaatttgacagctagtacaggcagttgccagtgtctccttctatacactcatttattcactcattcatccctgcatctatttaccttatgttcattgagcacctgttatgttgctgataactgtgcaagtctctggagctagaaaaaaatgagcctttgcgtgcatgagccagtgttgctcaaactgaggcctgaggaacagtggtcccaagtgactgtcctggaaaaaggggttccatggtcaagtaagtttgggaatcactacatcatactccaccctttcttagacatgcacaatgcatgttattaagactgttgactttatgaagtagtccagtgaagagccatatttgtttcctccagcattattggtagcagagcccgtctattatgtaatttcttttttttttttgagaaagggtctcacttttttgcccaggctgagtgcagtggcacgatcacggctcactgcagccttgacctcctgggctcaagtggtcctcccacctcggcctcccaagtagctgggactccaggcatgcaccatcgcacccatctaattttctatttttttgtagagacagaaaaatatctttctctgttgcccaggctgatctcaaacccctagcctcaaggcatgctcccacctcagcctctcaaagagctggaattacagacgtaagcccccgcacctggctgtaatttctataaggaggagaagcttcctagaataacagtggttgattgttgaatacctatacttttttaaacaatacattcttaatgctttttgtgagttacttcttataatcctcccagcatcacagtgagataggcactcttacagagaaggcagccaggcacagagatgctgaggaacttaacccaggtcacatagctagtaaatggcagagcaaggacatgaacccaagcaccaaactgggttggtttatggcctctgcagcacagttagaagcaatatggaggtatgggagttccttgtggctcgctcatcatgtcaccccattagctctatgcaggtttggcccatgtagccaactgtggatctgcggttcctttctacgtttgcagcacaactttatttctccagggatgcttacaaacattcaaaaacaatggaacaatgcaagtggctgcagctgtggggaagaaacttggcttgtttcattacgtttcagccaactgggatctttggttacaagtgaaggttatttgatttagctttcacttgtaaaatgagtaaggttttggtttttttctgctgcattttggcatcttcctcttcagagtgacccctcactgggaaattttcttataagatccagctttttaatgctattttctagtttcattctagctcctgctctctgtccctatctgttttgtttttgtttttgtttttaagaactgtaaagattgctatttgttttcatttttggtttttgagttaccatgtccctctgatgcagcatctctgtctcttagcggccgtgggggtgaccaggcacaaatcgaaggagctgagtcgcaaacagagtcaacaactagaattgctggaaagcgagctccggaaagagatacgtgacggtaggctccaaaattgtgtttgtagaaaaacaagccttttatatttatacttttatttttttacccttacatagagatggccacagtaatgagaactgtttgtataatagaaggcaacggaagggcagggcctgggcctggctttgtgttttatttcagctcttctctgcagccaaccaagtcattatctattgtttcttctttaatgaaaaccaaggtcatactctgtgttagacaaaacagcagaagatcctatccattgtttgttgagttaaaatattgctcttgggattctgttttgcaggctttgctgagctgcagatggataaattggatgtggttgatagttttggaactgttcccttccttgactacaaacattttgctctgagaactttcttccctgaggtaaaagagcattgatcatattccgaaggtcgagtcttgaataataatgaaggtgcttgttgctgttgtcaaaacgagtgtttgcttccaaggcagctataatgtgcttggtacaaaaataatggcttaagtttgagcagagcagggaggagggtaattattaattgcattgattagggtataaaacagtgatgggtcactggtgattattctttgcccagtaacaaaaacctaggagggacagaagctcagagtgatgatttttgctttcttttactctcaatgtagaactgaatgtgtagctgggaagtgagctagtttatttaaaaatcaataaattgtgagctagccaatttgttgtgtttatctgcatgacttacattgcagtgactagattattcactattacttctcaattggaaaggaaaaatactactggtcaaaagggaggaaagtagacatggatggaattggagttgaaaacaggcatttttagccatgtagagttcttatggttctctttggtagtttttctttagctggtcagtttgtattgtcctcatttagtagacgtagatgcacgaactgattaattcatttgttctagggctctgaggagtcgtctacttaaccttttgggttgctggtcttacctatgttctcacgcctccattttctcacccactcactcagccttctccatttaccctcccaagtctttggcgaggtacactcatcctgcgtatcatcactgccatgtcctgataccccagctctgccatattgcccttcttttttgcggtatgatgaccacatagaggcccaacctcttaaacacatcaataccaatgatcacatttcaatctagacttctaagcaacggctgaaatctctccaggccaaaggagagtttgtatcaccttaccagaagcttctccggaacaattggccagaagcctagagttcagaaacccagacacatgcagtaagcaatttccagtttctctataatttagaagaggacaccatgatatgtaatgcggggtctggaggttggaatgcctccataaaacacctgccatattttttggtccaagccttagtgttataaatcaagaaggctgtaaataagacttcagctttttgtgctggtgaagtttgtttcctttaacttatcctccaagagtaccgaggcaccgagatctaccatttgccacctcatccatttctatggcagaacaccgcctggggaaaggaattcgattccccgaatcaggatgactgtgtggggcttctgcaaaggttgcatcacgagtcctatttctgagctatctgagatccccattaagaatttaaaagcaataaaataacggagatttttgactatcaacatgaatgctgtgtgggcttttacagttaatgattgcccttgagtgctgaataatctgtggcctgaaaaaagaaatgttcttatcttctaaatttggtaatcaagaacaagatagagtaatgaatgtaaaggaacactgttgcaagttgagtgtttccaaaaaaaaaaaaaaaaaaaagatcccaggaacaatgctaccttattttaggagaagagagatagttgcaaaggaggcaaactgatttaactcagtgttgtgtataatcttgaaaaacaactgggaaagtcataaaaattgaagtcagaagttgtttaaaggagagaacccaggaaaaaacatgcataaatttgtcagaaccctttcaagaagacctaagtcaaaactgattttataataattaagaaaagatagaacagggaaacagatcgtaagaagacaatgccacttaaatgcattccaggctgcagataagtcctggtattaattaggctctttatggattgatcagaagccgaatcctctaggcctggaggttgggggctgtgggggtaggatttgggtgttcagcacctacaaaaaagcaacaggcaaaatccagaggagattgtaggttctcaaaggaggccagggttctttgctctgcctgtcggttttggcttttaaagccttgctttttattttattgactcttctttgctttgcataaagtaggagaagaaataagggtaggcagaggatctaagctgaagaaaagggaaatttgaatgaaaggaggaagcagccttaaaactcagagagccacgggtccaggcgcggtggctcaagcctgtaatcccagcactttgggaggccgaggcgggtggatcacttgaggtcaggagttagggaccagcctggccaacatggtgaaaccccgtctgtactaaaaatacacaattagccaggcatggtggcgtgcacctgtaatcccagctactcgggaggctgaggcagagaattgcttgaacccgagatcaagaccatcctggctaacacagtgaaaccccgtctctactaaaaatacaaaaaaattagccaggcatggtggcgggcgcctgtagtcccagctactcgggaggctgaggcaggagaatggtgtgaacctgggaggcggagcttgcagtgagccgagatagcgccacactgcactccagcctgggcgacagagcgagactctgtctcaaaaaaaataataaataaataaaaagaattgcttgaacctgggaggcggaggttgcagtgagccgagatcacgccactgcactccagcctgggcgacagagggagattccgtctcaaaaaaaaataaagaattgcttgaacccgggaggcagaggttgccgtgagccgagatcgcgccactgcactcctgcccgggcgacagagcaagactccgtctcaaaaaaacaaaacaaacaaaaaaacacacagagagaaccagggcggcacttccgtatttacgattaagaatcaacctgtttctcctgtctatttacatgaagttggttcagcagaaaaatattaagaaccagaaaatgcaaacctagggtctgggggtttttttggtttgtttttttggggcttttttgctttttactaggggaggatatggccaaaatagtttcaggtcttttgcttgggcttgcagatttgaaactatgaagcaaaattctctacagaagaaatttacttcacaagatataaaattagctcaaagtttctattattatcaaaaaagaagaaaaacttgaatgttttgagtttagagtctcattctgtggacttaaagtattgcttaacatacttttaaagtttaaccattgatttttaataagattgatgatacactataaaccctttttatattccagagctacctagcatttagaaaccagtggggtgatagcattgtggtctagtttgctataaattaggaataaaaccagtaatgataactgacacagggcacttactctgcacccattttattttcacactaaacctctgaggtgggaaccattactgtccccatttcagagatgaggcaagtcagacacagagaggttaggtaacacatcccacgtcatgtgaccagtatgtgattaaaaccaggactggaacccaagtagtttggtccagattctatgcttttaactaccccctgtctttcaatatcattgtgtattgaaacagtagatgctacttaggtaagacttgtaaaacttaacaacgtaatttagtctttatctttagaaggtaaattgcttgaagaggggtctgatatttgcataatcttcatcaatgaccccttctttaactcttaaatcacttcttctaaaacgtgggatgataccttcatctaccaaacctggaactaatgccatgataattattattcttagaggctttcggaattcagtggcgtttcttgaaagctgaataattatttattatgtattagagaatacgcagccaccataaacccaggggcgcttcagattagcaaatagtgtctctactttattaaaacggacttgggtattataacaaaaatacactcttcatttcctttggatgttatgaataataaaagtgtctccttcctctcagtcaggtggcttcacccacatcttcactgaagatatgcatgtaagtctctacgttttcatttttagcccagtgactgcctgatgttcatagtgttatcatcatcactatcatctctattattattactttgaatttttattgtgggttttttttggatcatgaattcaatattgaataattcattgtcttggaaaacccattgtgggtctactttctaactttaaacttatatatgattttgtattatactatatatttttttctttttatcagaacagagacgccaacgacaagaatgaaagtctcacagctttggatgccctaatctgtaataaaagctttcttgttactgtcatccacacccttgaaaagcagaagaacttttctgtgaaggacaggtattagtccattctttgatgttttaaaagcctttaagaaaaaatcaggccgggcatggtggctcatggctgtaatcccagcattttgggaggccaaggcaggcaatcacttgaggccaggagttcaagaccagcctgaccaacacagcaaaaccttgtctctacaaaaaaaaaaaaaaagagagagaaatcaaacctgagtcccatattttatttccaaaccactatctgaacttggtatcttgagaacatgcacttttccaaaggctatttgattgggagtttatgcagccttctctccattttagatcataccaccccaacacaatttttttgttgttgttgttggagtctcactctgtggcccaggctgaagtgtgtgatcataggtcactgcagcctcatcctcctgggctcaagctaccctcctgcctcagcctccccaagtagctggaactacaggtgcatgccaccacacccagctaatgttttgttgttgttgtagtagagatggggtcttgctatattgcccaggctggtctcaaactcctgacctcaggtgatctgcctgctttagactcctaaagtgctgggattataggcgtgaaccaccatgcccggcccataaattcttaataaaaaaagcagaagtgttaatttttatttttaaaacatcccgaaactttggaagactcacatcttgttaccactctagtttaaatgctgaaaacacagaaaatgttctagagatagaagtggttagaatctaaacattaaaaaaaaaaaaaaaaaagctcccaacccaacaggccagctccctgccctgccagtgagcttccatggaaactcccatgggtgtccagctaggcctgcagccaatggttcacccagctctctttttcaacaggtgtctgtttgcctccttcctaaccattgcactgcaaaccaagctggtctacctgaccagcatcctagaggtgctgaccagggacttgatggaacagtgtagtaacatgcagccgaaactcatgctgagacgcacggagtccgtcgtcgaaaaactcctcacaaactggatgtccgtctgcctttctggatttctccgggtaagtgtcacatccctcagcaatgtcagaggtaagacaataggcagttatttttagcggactctgatgcctttgccaggataaatcctgaatgctcgatggtgtcagcacttaaccatgtttcgtcttggtcctgacccagaacagagagagggaaagtaaacattgtttttgctgcaactggcctatgcaaatgtaattcatttagaatttcgtcaggtgagacttttcaggtgagtttaccttctcacgtcaattcacacccagagcccagtcagcccatttaagaaaatgtactgagaaaagggaatatttcaaacaccagagaacaaactgtttcaggccctctgaagcattgtagaaatacccgttgcctaccaatatgctgtaagctaattgcagtcaattcctaccagtcattccgcattaaagcagctctccaaagagctgcctccccctggagtttgctttgttggagttactgtgtgcatgtggttgtcactaattgaactttaaaatcttttcaaatgcaaactttctatagattccagtggagaagagggtgggccctaaagtctgctacttgatctgaatctagacttcaccacttacttggttttataaactagagaattggaagaagattttaggactattttgaagtacagatgagaaaacataggcaattgcttagccctaaggaagcctccataaatgttggccgttacgattataaaatattaatgtgaaaataagggtgtcctgttgaactcgatcttcacccagccctctgaggcccctggtacagaagattcttatcctttaattttaccagccatccagatttcagcaaaactgcataattgtgtatttgtagctagttccgaaatctaattaaactttgaataagatacactgctatgccacaggttttaacagtgctacttaagtttagatccaacagcagtgctttaaatagactgtgcttagtttaatgtttaatgcaatcttacaagtagatgcacaacaattttttttttaatttctcaccaacccctccctctccctaaggcaatacccatttattaagattaatgaaatctgccttcttttctgtttacttggtataaatcatcggaggctttggggagatgttgagccagttatttctgggacgaatatttttttgtttcccactgtctttgctttagccacaacagctgctagatggaggcaccaggactctcacccagttccctggtcttggtcttcaaaggccaactcctgccccaccacagtctcactggatcagaagctccggaagtggagcccagtaatccatgattttcacaagtccctgggatagtagagagagcaccacactaggggtcttggttagaagcagcaggtctgggctctggaaccatctcagccccggtcagctgtgtgtccctgggcatggctttttccatctgggcatctgttttcaatccaccaaatgacaggcgtgtgtgggcgttgcctttaaatccctttccagctctttctactggatcttgtgattcttaactctgagctttcaagggctgctcttgggcattagaggggtgagatgttcagaaaatctgggctgcgagcccaaacagcctccttgagcaaagcattctgggtcaagacttcacagtgctgattcaagagcgtctcgagcactctgagtggtgagggggcggctcggctcgccaggaggaagtggcatccagccagtcggcgatactttcactttcagtggaataattcccgctggtgcaggggtctgatgtccctccaccaggtgctcaagggggtctgggacaccgacagccctagtcctcctgtcctaccccacagacgtttagtgggtgacagtagctccgtgaccgccaggtaactttcccttccaagacaccaaggatttgtgggtaaaataataataccatttattgaatgtgccagacagcatgctaagagctttacctatcttttctcatttcatccccttaagggtcctgtgagctaagtgtcttcatgaccattttgtatatgggggaactggaacacagaagagctgtgactctccccagatctcactgctactgtgggacagcaccagggtccgagagctcttagccaccgccctgtgccctgaaaagatggaatctgccctggtctgttaaagtgtcgaagcctggcccctgggggaggggaatcacgtacgcagcggctgtggctcgcctaaaagttgtgtttagtggtgacagagaaacctcatggccctgtgattccccaaatcagccacacatcagaatcctcctcccccaccgcctccccgcccccggccccgggaaggtaatgaaaactacagatacccaggcctcattcttcagagagatggcagctctgtaggtctagagtggagctcaggcatctgaatgcttaacaagagcccgcaagggattctggtgattagccagggttagacccaggagcatgggcagagtgtagggccagatgttacttagctcagtctagctactctccagaaagttctggagaattcctgaccacaggcctcctgagtcaagacctgtcccttcacacagcccccgagagcccacctggccccctgactccaacccctgcgggagtacacagcccctatccaagggttctcagcctcccttctgatctgtgctggaggaaaagaggttctaagttttgtggtcagggcattacttggggtgggggaggtgggcggtggagggaaagagaagagaagggtgaggttgtaaaccactaaataaaggaagtttctcatgagaattaaatgtcatgcactagtcctgctgccctccctaccttggaaatttctgaacttccacttctgccctgcactgaagaggagactcaaggaggtatcacagcagggatagaagctgcagggtggcaggaggtggcaagaggaagcccggggactggggagggcagatattcctgcagcaagtataaaggaagggacagggttggggtgggatgctgagagacttaagatgtcttaggtaacttgcctgcgcaagggaaagcaggtgagacccagtggaatcctcctttcccagctggacgtatcgcttgtcaagcttgactcttaactggcgcttcgagccccagccacgtggctggcctttcgtcatcactaaggcactttgacttcccagccacggttcttcctccaccacagaggcctaatgtccattgattacggaaggttcgttatttagcaaatactctacagctgacccagggctaagtgccttgggaggatgccgtggaaacagaacacaccgcctcccacttgaggtgctcagagtcctttggaatgcagacatccgtgtctgcgaatgtgagccatttccatcacagcaggggaggcagccccacccccagccaggaaaaatgcatgtggcttaaatttgtagaaagagccaatcgggatgggccgagtgtttggagaaaaaccttagaggaaatggaattggctctggttcagggaagaagatggagtccctctggcccagcaccggaaaacatgtccaggtgggactgtgcagtgtgtgtctgggaactgcccgggccgggcctggcctggcccatggagaggagataaggctgcaaactgttgaacggcaggctgcttccttcgagaagtgctgttaacaccaaaaaacattgtatttggcaaatgtataaaatgttcttacatttatccttgttactaaggatacttgtgcatttttttaaatgtcgtttatttctggcttgctaaagggtgattaaatacgaatgtaaacaaaggtacactctccacatctaactgttcctaggcattaacccactgatgagcattagtctgccatatgtaagtttaaacataaaataacaaggtatactgtgggtactgcacgtcgctgtgaatgtgcacgcgtgcgcgtgtgcagatgtgcattcgcgatggagagaggaggcggttttctgagttttgcatccaatcccaagtggagcaacgtgtattttcttgggcgtttcatgttgagtgttagaaaaccctgtctcctgccttactgctgtaaacagaaactttaattctttggaaagtacagtggattccacagaaagctaactgtcacttttgtgtcttttccaaggagactgtcggagagcccttctatttgctggtgacgactctgaaccagaaaattaacaagggtcccgtggatgtaatcacttgcaaagccctgtacacacttaatgaagactggctgttgtggcaggttccggaattcagtactgtggtatgttttcaataaagctcccagccagactcccaaataaatctggcggggaattagagggtgaggtgggtcatttacaatgaaacggtatcatctctactgcgggaggccctgtgtgtttagttaattaaaaacagtagttgataaaactgttaacacgtgttcacataatagattttaattactgagattgggggagaaaatattgtaatgatgcctggggtactcatcaatttccaaagattttaatatcaggattgcttataactttcagtgtcgtcaaaggaaatgcaaagtactccctattcagcacttataattgcaatcagaatttctcaaatggctctgctctgggaagacaatgtgtgaagatatatttcaatcaaattgaggccgtcttattttagaatgataacacaagacaaattccaccacgttccccatgcaacgtgacgccctttattttcatggattagttacaaatgtttggtgtcatgcacttaatgtactgtgatctcatagatatttttagaggaacgctgtaaatcactacaggaagatgattgcctagctgctggagggtttcacccgcttgagaacttctttctaattcatccccaccgcacccaccccatgctcttcctaaagaaagaaagaaagcccagtttggggcacatttgggaatttcagagagggagccaagcagggaaggtaactttagaattaggaattttctatgcttttctgttagtagagacttggagaagagattgctgtgttttggtttgatctttagctttatgaagattctgggcttcttcacgatctcgttagtggaggaggaaaagattacagtggggtttgggaattgctcattaagagagctgagtcttctgtggctttgctctggatggtggggactgcagtgtcatctgggaagaattcattccctaattggagaaggcaccactttgccgtggagcgtgttatggttatgtcctctggtgggagaatagtccgtaggtcagctgtttcaagttttctgccactgccagatgcggctcacttctccatcaaagatggcaccatgcacagctgccatccgagagcgggaagctgagctgaaagtcaacacttctcagcgttctgaattgtatcaatacacccatccacatctgagaggccggagagtgggctgcattggttctcaaacttgagcatctagcagaatcgcccagaaagctcactaaacaccagtcgctaggcagcatgctggagtttccgatgcagtaaatccaggctgtggcctgagaattcacttccctaaccagcttcctgatgctgcgggtgctgcttaacaactgttggtagagtggttaacagcatggactctggggccagacattttggaatcctgcctctgccactggttagctgtgtaatgttgggcaagtttctaaacctctctatgcctcattctcctcacatgtgaaatggaaatgatggtcatggttcctacccatctcatgaggtgttttgaggattaagagtcagtattataaaaagcacttagaacattgccaggcatgtgagtgctacctaaaactttattccatttgatccagatctcattgaacccttgtttaaaatgcaggtgcaaatataccagtgcccgggctttccctcgggactgactgaatcagaatctctggggagggagcccaggcgtggatgtattttgtaaaccttccagatatctctgatgtgtgttcagcctggacaccactgggtatcttggagaacaagagacaaactttgcacagggcctgttgactcacctttcgctgatcctgggcttgttattcctaacctagaagatgttcatgcctttactttaagacgttttagaagccccaaaggtctccaaagagaaatatttgcaaatgattatagtcgggaatcctccagcatttcagtcatgagacaacaccggacccaaacaggaaagacaggaaaggagaagatgggttggaatcaggaagaggtcagatgtctgaggcaacttttgaggttttgaagcctttttaatgctttacatctgaacgtgttttctccctttcatttcgaaacattatttatttcacagtcaattaagaccatgtgtttctgatttgttaacactcgactcatcatcataatgttacttgatgctgaaggaattcatgtcgactcttgaaatttttttttctttatagcccctggggaaaagggtaatggaaaatcatgatttcagaaatccacataaatcttccttttcaaattcagatttgccggtacataagatttgagccttgaaaaggaatgggccacttgtttttaggggccttgcctttaaaaatgattgttagtgcctcttatggggcctggcccagcccccctttcatggttggcagttgtacgagaagctgcagagaaggcacatgatccgttctatgcttgtgtgacaaactgttagcagaaggtcaatataaaaaatttaagtttttcatttcctttcaggcatttcccccagcctgaaccaccatatttctaattttctttcttcctcccttccctcctccccttctttttcacttcccccacctacccctcccaagcatgtacacccagccattttaggacttgatttcccaaatttgcctgaggtggtttatgtaattgaaaaccaaggtgcggtgaacaaactgattctgtgtgtccttgtgtgctggggaggcgggaggttgggggcagattctttcaaggaaaggaaagtcggaaatcaagagcatcctcacgaaccacttgaaatgacagaacctggtgccaaggcagggacacgtttggaaaaaaggcccccacactcgtgttcagctaaatgctcagaagcacagcacctcatatagcaatctaaaagttagctttcacacctctcagatgaggatgtgttctccctgaggtgtgggggattttctagaacataaaggcatcttgccaatttcttatacatgaaatcatgacactaacaaagaggccctgggaagtaatgttctcttcttgcatattgagaagaaaattcctctgtcttgccaaaaatccaagcaaagtcccctagagccatacttcctccaggaccataagaaaccatccttctctatcaagcattccaggctggtgtttaatgaggcaacagtgagacagaatgccctgatatctgcatcctccctaatgtcagcaccaggggtagggctgtgcacacacaggactttagtctttccttaatatctaggaattcagatcagacagctggaagagaataagaccttttttttttttttttttttttttaatttaaggaataccactctagtgcaggctggagtgcagtggcgcagtcttggctcactgcaacctccgcctctggggttcaagcgattctcctgcctcagcctcccaaatacctgggattataggcacctgccatcatgccaggctaatgcttgtatttttagtagaaacgggttttcgccgtgttggctagcctggtcttgaactcctggcctcaagtgatccacctgccttgtcctcccgaagtgctgggattacaggtgtgagcaactgcatccggccgataataagacctattgctctgctgggtttttttcccctttgcaaaattttgaacatgtttgattttgttgatggagtatctcagactcactcagcttacgttttgtcaagagtggaactttggaggagttagtgaaagtttgaggatttcacatgggagaagggacatttgcttcactttcaggaagagatgagaaaaaccaataactcgtagcaagcgtgctgaattagcaagagaaggttgacttgtaatcaaagttaagtgtgaaatggttttttgaactcttagaaaacgagcttgccaatctgctgtatctgagagagagcatcttggcaccctggaaaactgttccgacaaaaatattattgccttcattctcctatctataagaaagttttcaagattattagaaattcttgaaaaagcacaagtacatgcctgcagaaatattaatgcctccaatttgatttattgaaggtttatgccagcctaccccagtctgtctctttctctagcagttaccattttgggacaattacgtttaataaaatatctcatatacaacagagccctaggtgtctccaccaggagtttcttactagtatacttcctttaacagtgctctgcctaccagtgctggctgcttctgttccatttagtttgtccttgcagaagatccattagccccgtaattaaacaacccactgtcccgattaagtcattctctgttacttcaattacattccattgttcattaaatcctgatgtttgcacttcagcaatcttgtttttaatactcctaccatttgtggagaaacagtgaagttaattaacaattcttgagctttttatttttctctctaccatagtgcaaatcatttccattatgacttgcaatagtactgaaaccattactaacttcatagttagtgttctgagcttcctgatcaaagagtgaaaccactttttacaatcattttaggtaagtcattccctcgttgatggcaagtcatggaaaatgaaaaattaacatgtaatgggtgctttaaatgactttcctcttcatacactttcttctcatgcctgtaatcttggaattagaaaataatttagttatctaaatataaaagtatttactttttttctttatagctcaaatgtgactctattatgttattgttaggatcattatttatatttgtacccctcagagaatggtaaattttatcacaagtcatggcggagatagaaagcattttccagatttgtcttgttgctattgtcaaagttagcattccatttgaaggtactgttatctagagcagggaccagcaaacaacagcctgtgggccaaatgtggcccctctgcctatttttataaagttctattggaacacctgttcatttccttattgtctatagctgctttcctgctacagtgcagagtggagtagttgtcacagagatcatatgagttttaagtcttaaatactttctggccctttgcagaaagtttgttggcctttaatctagagcttgacatagtagagaataggaaccagaatcctccctcccacaaacccacaaacaggttggcctctttcctccccttctgggacacagcaatggaaatgccttgccactatttacaagtctgaaactcatggggctctttgccaacacacaacacccacccccacccccaaccctgcacccgcaaatactgtgaatactaaaatcagttatcttgggctaaatcagacagctcttcatacttgattctaggatggacaaaacgttagcaaatgctagcaagtatagaaaaattggtgagagaaacctaaatttgagaaaattatctccattacttttttttttttttaaatggaaaaaggctctcgttaccctgtcctccaccccttactcttctgttagagtagcagatcccttgatccaggaagctgtgatttatggatctttgtggggaaaggaaaaggggagcagagtgaagaggggaggctggatgggcaagcgcagctcaaaggggaacgtcaggcagaatgtcccagggctgctgactctggcttggaaagaagcttagatcagaagtttccctcagacttgcacttctaactggcctcatgctgcttctacggaacttctgaaactgaattttctttcttgtttcttctctctttaattcaggttggtataagaactaggcttttctcttgactttcattcggccctgaaataaaattagaaatatattttataggttttatttaatgaaagcaattattgctccaaggccttttatgataaagttgccagtttgtaataaattatcttacagttactttctaggcattataaggtatcacagaaaggaggcagcaacgttcctgcttttattagccaagaatatggttgaggagacagtgaggtagccagatcatcttcccatgtgggaaaagacctgttcccctgcccttgattcatcctgccagccccctgcagccttatcctctctgcctcctcaatacccaaaaccaccaaatcatgtgacgggacgatgggtaaaaccggtagtgaaaggggaatgcagttacatgttcccaggccgtgtgcagaagaggtggggtttggagtctgatagtcttgggtttgaatctgggctcagccactttactctgggcaagtctctcaacctctcaaaacctgtttcctcttctgtaaacaggcaatgaccaaaacctgccctcgcatatttgtggtgaggtcagaaaataatacatgtaccacgtctagccatctttcctggtgtgaagtaggtgctcattcttttttgattcagttttccttgtctgaggtgtgcttttctcttgtctcctgtaagcttcactaagcagaaagtgtcccgtcagtattctttttggttggttatttattgatgatgtgggatgtgggggagttgattagctgattccatcatcatgaaaagcatttcttgggtgcctgtgtgcttatgttcttgttaaaaatgttacatatgaccgctgtgatggggtgtttacaacctgtggcagacagtatcccattgggcagatgtgaacaggagacgaccgtgataacctgtgagaggctgatggctgacatgctacaaaggggccaggcctttccagcctggccctcttcccgggccttctggaccatacattttccaatagtcttttctttctcataaccctccttggtaataggcatcattcccaaatcaatcaggatgcagttcagttgtacagaacagagacccaagatgtctgtggcttcagcaacagagaagctgagttctctccctggtggcattctgggtgggcagtgcagggctggtagagcagctgctcctctcttgtcctcatattctaagtgtctgctcaccccagcctcattccccatcccagccagcaggatgtaagcagggctgtagaaaggagggcagatggtcaccagccatcttttaaggaagtgccacataacatatccacttaatgtcatcggccaggacttagtcataaccagaacatgtcctgactctgagctgcgaagccaagaggccagctctgggtcaccatctcccagtgcctcctggccctgccatcctagtcacaagatggctgccaccgctccaagcactactctcccttttgttcggatcgaagacttcccactgggcatggtggctcacacctgtaatcccagcactttggaggccaaggtgggaggatcatttgagcccactgaatctggagcatactggccacacctggcagcagcagaggctgggaaatgtcacctttattctgggtgaacagaagctctgtaaaaatgtccttgggtggcaccggaggcacagggtgctccagattcagtgggttctgtggggttcaatatcaagctggggtgaggaggtcaagcctcctctaccagatcgcctatgtccagcctgtctcctgggagggcattcattgaggccttcaagcagaggggaactgcccttgggaggctcatcaccttggctggcctcttcgcttcgcagcccagagtcaggacacgtcctagttatgactcccaccggctccatgattttggacatgcttctaaatctctctggtctcggtttcctcatccattaaatgaggctaataatggcacctacttcatagagcagttgtgaggattgaatgaacctataattgcattcccagtacgtgataagcactcaataaatgctggtccttattattacaaatctagaaccatattcttttctttaccatatttttttcctatgaatagtacagggactctctttcaggtggcaggaggtggttttgggaggcaggcctgggctacaagtcctccacccatacttccacccaaagaaggtgggatttttttctgtagacttcctgacctgatagcctgagtgagtgattgaagcttcctgctcaccagtctaattagagactggaagccaagtgtctccatggtctaggggcctccctcatgaactacagctctttgcgacccaattcaaatgctgcctcctccatgcagccttccttgatttctctgtttgaaaaccccctgccgacctaaaagaggtacctctctaaatccctaaaatgctccgtctgtacctcccacattctacctggcattagaatgtgttgtatatgccccacagttcttctactagtctgctagtacttcccaagcaggatgagtacaggttctgatttgtatcacctacagtgccctgcacacaataggtgcaaagtaaatggtcatcaatagacgaatctacctcagcatccacaaaatgagctctggcagtttggcacatgcagctataagtaagagaaaattgaactaaggatgcctgaaatagtaagagcatgacttgcctcttagagcagaaagtctggagggaaggagctccaagccggtccctacattccgtggtgtcagagctctgcgtcaccatctcccagtacctcctggccctgccatcctagtcacaagatggctgccaccgctccaagcgctactcccccttttgtttggatagaagacttccaacagggtgtggtggctcacacctgtaatcccagcactttgggaagccaaggtgggaggatcacttgagctcaggagttcaagactagcctgggcaacacagcaagaccctgtctctaaaaaaaaaaaaaaaaaaaaaaaaaaaaaaatttagccaagcatggcagtgtgcacctgtagtctctgctatgtgggaggctgaggtgggaggattgcctgagcctgggaggtcgaggctgcagtaagccatgatcactgcacttcagcctgggcaacagagtgagaccctgtctattaaaaaagaaagaaagaaaacccttggttttatgtgttggccagagctgggttacatgaccagtccctggtgaaagagaagggagttgctgctgatcatgcctcccaacccaggctggacccactgctgtgcagacctggcctttgttagcagaggagggatggctgctggttggacgacaaaccagatctgccaccgcagcttactgacactttcctgccaaggaaataggaagaggcagggcagtccctctaaacagagggcagatttctggggaagggaccagtgtacatttcacagctctttagcctttcatgggtattttctgggtattatgccatcccatcgatttggaccatgcttactttacaaaacattcttgtacttccaaaggcaggatcaccgagtgtttaagaacacggagcttgagtacccggttctaccatcttcttgctggctgaccttgtgccatttatttaacctctctgtgcctcagtttctcatctgccacaaggggatgagtaaaagaatctacctcacagggttgtttctgagatttacatatacaaatacacacacgtcatttaaaacagtgtctggcacctataaagcactccttaatttgctattattatgtgtcattatttagtgatcctgtcactcctttgagataggaacagtgaggattttaaggctcagcgaagttagacgacttccctacattccctcagctggtgagcagcagagaatgggagggtccaggtggcccggtgctgggcctggaactcagggccctgacccccactgtcctccctactcagaatcctctgtggacacttgctgagggtgatagtcactgatgggtgactgttgtcccacagatgatgcttttgtctctgaaatttatcatgaattatctgagaacaaggactatgtcataacatctctctgacatcccagccctaatactaaatagggcaggagaacatgctggttaaatgggctttggtgggagtgtgggagccggagagatggcgcttccatcgaggtgtctcccccgatggggtacagtggctgagggcagacgctgtgatgtcacgctgtctgacatggcacaggcatctgctccccatcacagagcagaggcccgcgtgcactttcccagcctgggggtggaggtgttaagaggctgaccccaagggccttgactgtacttacgccttaagaaactgctgtttggccgggcgcggtggctcacgcctgtaatcccagcactttgggaggccgaggcgggcggatcacgaggtcaggagatcgagaccatcccggctaaaacggtgaaaccccgtctctactaaaaaaatacaaaaaattagccgggcgtagtggcgggcgcctgtagtcccagctacttgggaggctgaggcaggagaatggcgttaacccgggaggcggagcttgcagtgagccgagatcccgccactgcactccagcctgggcgacagagcgagactccgtctcaaaaaaaaaaaaaaaaaaaaaaaaaagaaactgctgtttgagcactaagtgttagcagcatgaaaaatgaacacatatcaatttatgtctgaatttactctcagaattccctgtggactctgtaaaatgccattttacctcttttccacccatccagctgtggaggcagtggcagatttacattattttacatccagttaagggtgttttttcttttggttatgtttttaaaaagaacatttattgcccataaaaaagtgtttttgttaaagacaatagtgcctttaggtagtaatagaatgctgtttcacaaatatttataaaactattaaacaagctgagattgctgaagctccgattaaaaggtgcctcccattcatctttccctttagaaactgaagtagcttaactgcaattacccgccaccatgagaagatcaccttgcagagaaataaggcaagaccccaacaagatcgtaggtggtggcaccagcattgaccccttcacacccacccctcccactggtgtggggaatttagcttaggacattgcttacagcctgagctaagccagggtttctggagggtcaggagggctcctgggctataggtggaaccagaaggagggagggagggcgggtggtaaagcggggatggcatagccgaggggtttgtggcaccaattgtgcagttaggcaaatctggcttcaattcctggttctgccactggtgagctgttcctggagcaagttactcagcccctctgtgcctcagttccctcactctacaacagggatgggaataataatccaggaaacatttctagaaaagagaggtgaggagagggctcgggtgtgaggcttcacatgttggttccttctagacactctgcccaccagctccctgccttctctcctgtctggtattttttgtttcttgtttgtgagcagacaggcctttgaaccccttcctagtcggtggctggcccagaacataaaggttctctgagagcaggcaagggagtgactctgttgtaggagggaaactcgtacaggccagacggagatcaccggcttacctcagagttcagattccactgattcggagttttaatcatttggttgagaccagaacaaaatttactcttgcgtaattatcaacaggattataagggcaagatttagtggtgtttgtctcagctctttataaacacaccataaactgggtggcttataaataatagaaacttatttctcacagttctggaggatgagaagtccaagatcaagagttggtgtcctgtgagagccccctttctcatgatggcgccttcctgctggatcctcacatggtggaaagggcagggcagctctctgaggcctcttttataagggcactaatcccatttatgaggactctgccctcatgatctaatcccctccaaaggccccacctccaagtaccatcaccttgggggttgggatttcaatacctggagttagggggacatcaatattcagatcatagcagcattaaagacaagatacacccctgagaacctcccgaaatttcagaagccccacatccacgtcagtggtccataagtcacgggctcacatgccagatgctgttctaagaactgtgcggttactgttgttatgccctctttgcagatgagaaagcgacatacacagaggttacacagctggttagggatgggctcagaggtcacccagctggcttgcggtggactgggatgaaagccaggagtctactggcttctactgggttcattgctggcagcctcctccttattcagagatactgagcatggagtgggcgtcctagctgtccaatgtgggctgaatctgtttgcaaatgagtggatactaatgccaacaatagtaattgtacaggttttattgccgatactatcgtcaagcctttcccagcagcctggccccgtgctaagcccttgaatgcatgatcacatttaatctccctaacaatgctagaaggccggtactgttattacacccatttttaagttgaggtaggcctgagggttcccatcttccatatgatttgtgttttcatctctcccctgagccctacgcaaatcagacattgcctcctgcagcctctgcatatatacctggctagtgtccacagtacttggggacctcctctttcggctttggagccccccctccctctgtctctgtatgggcgagcatcttccttctgtcttctcccttccttcttgcctgttagactctccgctccttaaaaccaaaaaaacaaaacaaaattcccattacttgatcattttacattccctcgttaagccaggctcaaaacattaaataattgtgcatttcacaccatacccaagcctttctgactttgtgattaccaaggtgcattagaatctaaactgctatgttatgctatttgcaaaatactcttggctcttccctgaatcaattcccgtgagggtacgtatcaggtaaaactttgttgttttagatctatttgttcttagacaaagtaaacttggaattgcttttcagtttgttttgaaatattccctagttctgtgttttcacacgtgcacaaaggccttacttcccccattagtctgattctgaagttttgctgcactaggagaatgttcactgacaaaatgttaagtaatggtgctgaaatgtaaagtaattaatgcaagaatcatagtatggggtggggatctcagtgctttaatgagggctggggaaaccatctgactgaggatgttgaaagcggaggggtagatgaatgttcctgtaattaatgctgcatattaaaaaagtgacctctttgggccgggcacagtggctcacgcctgtaatcctagcactttgggaggctgaggtgggcagatcacaaggtcaggactttgagaccagcctggccaacatggtgaaaccccgtctctactaaaaaaatacaaaaattagccaggcatggtggcatgtgcctgtaatcccagctacttgggaggctgaggcaggagaattgcttgaacccaggaggcggaggttgcagtgagccaagatagcaccactgaactccagcctgggtgacagagcaagactccatctcaaaaaaaaaaaagtgacctctggcatggtcaatatggggacctcgtaaccttccctgtcacctagaactgcacttctgggactctgtggtcctattaataaaaaagataatcaccaatctgcctcatctactgtggaacccttccaattcttttttttctttttcttttgaggagaaattagaaatcaccaaattaccatttttagactatttatgtgtatatgtatattttactctcagatatatttattcaatgcttgctctataatgagagttttaactttctgttttcccttccattatccctgaaaagaatggattatggagaaaagatgaaagtagtctaatgcaatacagtgtttgctaatgtgctgtcagaggtattagtgggacttgctaaggtttgtgtcttttatgaaatgcctttcagattgcaattatctaatagacttggaaacctgtttgtactcttgcaggcattaaacgtcgtctttgaaaaaatcccggaaaacgagagtgcagatgtctgtcggaatatttcagtcaatgttctcgactgtgacaccattggccaagccaaagaaaagattttccaagcattcttaagcaaaaatggctctccttatggacttcagcttaatgaaattggtcttggtaaggcggtgcgggagctatgtggtcccaggccctgatgagtgtccctccctgcctgccctccctccctgtcccccctccctgccccaccagcttccattcagtgacacttacacagccaggttgttcctggagggcatgtctaggggccaagagactgctttggtctctcatgggcatcctgattcttcgaaggaagcacggtccttcaaagatggcgtttgttgttgttgtctttaaatattacgtctgtaaatcagattgatgagattgcaggccctgagactgcacggaatcaccttgcatcatgaaatacagaaaggtgtcaacacagtgccctctgcgtgtgttgcatttcacattggcatttgatttgtttgttgtgatactgagcgtgtcattactgggtggctcagactctgggtgttaactctagcctgctagaaaggtcatcttcctctgctaatcacatcctgtattaagtatatgctccgtcctcccccagtgtgcagcagcatctgctatgaattcattttcgggctctactggtatactgcaaaggagagcatatgcgtgagcaagctaacagggccccacttccctcaaatgttcatcaacattttaaagttgagctccgtgcagtcctcccaggagactgtcgtgggattttatagcagataatgggacagaaatgaagaatagaatcatggtggtgacagacagtgtaacgaggttcacttccccttgatgtacagttataggccttgactaagcaggcaattaaaatcctcccactcggccctcccagtccagccccctgctaaaaggccattgataaagccttgaggcagggtcttggaagtttgagaccatgcaaatgtggggcaacttggtgatgtggctttaaagaaagcagggctgctaaggcacccctcttctgcttccttccttgggtgaccgttgagtcacttgaggaccattttagctcatttggttagatacaggatcaaagggggagccccagccaggacaccatgaccctgaccccagacccccagcttccttgctctgagcatacatcttgcaaatatgtggctgtcactacaaaggacatgggcataccccgcccgacagtcttggtcctgccgctgatgagtaggtagtagcatccttactcttttcctgagtttgggtgtcccttgcctcctaaagtaggaaggcaaggagcagagcaaggagggggcctggggacacagcctatcagctatgtcaggcttctgtgtgcctgctgatttcccagactacctccagaaaccagccatcaactgtactgaaatccaacaccaggctggacgtggtggctcacgcctgtaatcccagcactttgagaggccaaggctggtggatcacctgaagtcaggagtttgagaccagcctggccaacatggtgaaactctgtctctactacaaatacaaaaattagccaggcatggtggtgcacacctgtggtcccagctacttgggaggctgaggcagaagaactgcttgaacccgggaggcagaggttgcagtgagcccagattgcgccactgtactccagcctgggcaatggagggagaccctgtctccaaaaaaaacaaaaacaaaaccaaaaaaaagaaatccaacaccagaagcagctatgcttggagctcttacagcagagactcaaaaacacagatgcccaaaggggcagaaaatacataaggggtgtcagccgcctgggactacagaaagcagtggagcttgacttaatgggaaaggactcgccatccaaggagacagtgccatttgcttcagtggttgccatgtggactacagattgtattactagactgttcgattttctttttttaaagaaatcagatatccagttttttatatgcaacttaaaaacttttaaaaaaaattttatagagacagtctcactatgttgcccaggctggtcttgaactcctagcctcaagtaatccccctgcctccgcctcccaaagtattgggattataggtctgagctcctatgtccagcctatgtgcaatcttttaatctttaaatgttggcactgagttgacactaaaataataattaaacaccatgcaggttccaaaaaaagaaaaatcacatttgtgcaccacatgctcacctaggcataggttagcagccttggccagagagtctgcccactgtggtgctgggaccttcgcacactgatgcctccccctccaccccgaacaggagcctacagagatggttcatatcatgcctctctttgtgaacatgggcacacaagtgtgagcatatacaaatttgcttctggaatttttgttgaagagcttagtcgtccctcatagaatgcattattttgtcttcagtggctttacttccaggcttatcagggaagaagtggtttgaaacatcagagccctaaacaaacaaacaaaacagaactcagaattcaggctaccagtctggctgatgcatctctacaccttcaaacaaagatttaccactttattcaagttttagttatccataaatttgtgaaagtaaagtggtggcattttaaaactctctaaaaaggaacaaaatgctctttttcagagcttcaaatgggcacacgacagaaagaacttctggacatcgacagttcctccgtgattcttgaagatggaatcaccaagctaaacaccattggccactatgaggtaagagcaagacttgaccccgtgtctccttcctcatccccaatcctagtcccatggacattcttttaaaacatccaggactcccacccatttcctggaatgacttgcagatcgatcgtgtctggggctgaagttttctttcgttgcttgtgcagacaagcccatgaagggctctcacagtgtacttgtcacgtattcccttctcagaaggctatgattttctatctcctgaactctctccaccctgaggttcagcagaaaagaacctaggaaaaaagtctaggaaagccagagaagagttatcctttagccttcactgggtgacaagcgtgctgatgctaaacaaagcccgggaagtcccaagcctcgcctccctccacaacattcacagtagaccttgtaaccttttgtgtaggtccttgcttcctgaagaagttctaaatttcctgtttgtttgcaatattgagcgatacttcctttggcctcttaacccacatactgggtgagtgccgagggcggtgaggggtgcacgtgacttctcagagatctgagtgccagagaaacctgcacataacaagacagaggaggcagtgaaggttcctgaacacactgggatactggggttcacttgtttagcagtattatctgaatctttgttgaatatccactctgataagagctggggctgcatgggagaggagcaaagaccaggtccctgccctcacagagcctgcagccctggggaaggagtgcaaaaaagggacggagagacaagtagagtcaacaccttgcgtgtagtagtgctgtgtggcttggagaatccaagaggcttcctggaggaggttatgactgaactgagagctaaacaatgagaatttagccagactgggctagggtgcaggcacatccagcagggaagggagagcatgcgtgttagactagtcaaaacttgagaggggcaatggagagggggaaggagggcagtgacagctgattatagtcagtgcttatgaagtacttacaccacaccaggtactatttccagcatgtccctgtaatgtaactgcccaacaggttcaccttccccattgcctagacagagctgatttatcaagacaggaattgagataaagtaatttggctgtacgggagatgggagttttattattactcaaatcagtctccctgagcgttcagggatcagagtttttaaggacaacttggtgggttgggggaagccagtgagccaggagtgctgattggtcaggtcagagatgaaatcataggaagtcaaagctgtcttcttgcactgagtcagttcctggggtgggggccacaagatcagatgagccagtttattaatctgggtggtaccagctgatccatcaagagcagggtctgggccaggcgtggtggctcacgcctgtaatcccagcacttcgggaggctgaggtgggtggatcacctgaggtcaggagtccaacaccagcctggccaacacggtaaaacgctgtctctaaaaatacaaaaaaattagccgggcatggtggtgcacatctgtaatcccagctacttgggaggctgaggcaggagaattgcttgaacccgggaggcggaggttgcagtgagctgagatggtgccatggcactccagcctgtgcgacagagcaagactccatgtcaggggaaaaaaaaaaaaaaaaaaaaagcagggtttgcaaaatatctcaagcactggtcttaggttttacaatagtgattttatccccaggagcaatttggggagagtcagaatcttgtagcctccagctgcatgattcctaaaccacaatcccaatcttgtggctaatttgttagtcctatgaaggcaatctagtccccaggcaagaaggtggttttgggaaagggctgttgttgtctttgttttaaactgtaagttcctcccaaagttagttcagtctacatccagaaatgagcaagagcagcttggaggttagaagcaagatggagttggttaggtcagatctcttcactgtcttctaacacatctgcttcaccgtcttataacagtgaaaggcatctgaaaggtttgtttcagatgtttttcactgttcacctttcagatgtctttcactgttatagttttgcaatggcgatttcagtatttcgccccattctatcctatagcagtcctacgagataggtactattattaaccccactttatagatgggtacgatgaggctctgggaggtctggtaacagctagtcagtggcagggccagattcggacctggatagttggctgtagggtctgtggctgaaccagtccatgctgtggcctcttacaagatgtaggggtagggaggcaagcagggaagatgcagatcacacagatgggggcagcctcttcaggagttctgagtcttatcccaagaacagtgggaagccatgggaggtcctgaagcagggaggttagtatttcagaaaatgagtggggctgtgtgtgagatgtagatagaaggggtgcaaacctggaaatagccccattagaagctgtggatttctggtgaggattggtgctgtccagcaataatgcagtggctctggacagacacagagacacacaaatggaatcagatgctcaggaggaggacaccacaagtcacgtggatgggagggatagtaagatgagggtggggtcaaagatatcagttggggatgactgtgcagatgcctggaggcaggtgctttcctagagaagacaggaggaggagcagcttcccagcacaccgggagggtagggaccccctgtttttcatggctgtacagtcccagggtgacaggtctgcaccaggaaggacctaggactctgccagattctccccttgcccaggaagaagtgagactgttcccgagcagagcttcttagacaatggccagggacagagaacacccatccttgggctttttggctgagtgggtcacccagtttgaaagtggttgcgttgggtgatgactgaggtgctgcccctgtggcattgctgtagggagtctagcagagaaagctgcaggctagcaacttgccccgtgctcactctcctatagctcagacttgccaaccctggaatcatcttgccaagagcagtcgttcttagcttttggagtttgtaaaaatccccagggagttttctaaaagtgtgcattcttgggctcaggaataaggggcatctttggctgtatttggaaaaacacggccccagagggaaggtaatggccaggaggagatcggagtcagagatgctgccctgctgggtggaagtgcttatcatggcatcagttcagggttctagacctgcaagccagcacctctccctgtgtctgggtggcaggcttgtcttgatgagttaggaggggacacagactccaaggccctcctctggtgctgttgactggagttcttgtcttgctcagctgtgcctcccctgccaggcttctcagcatcccttggccactgtggggcatggggtgggccgcagaggcaggggatggggctacccactgccattaataggaggaggcagggcaagtctctccagcagggagaatgaagaaccaccacagctgtctgcaaggcaaggtgaaggcctgtcgggagagatagaacatcagtcttcactgcagacatcggccgtgctagacacctatctgcttaaggatgataatgaaattaatccggcctgtagtcacttcccgtccaaatgatttattggcctcataccccagtgttgctgcatggtggtaataaatgacaagcctaggacatgaaggcttaaaggattctccttatgtttaaaaagctaagccataaggcaaataaaccagagagcctgaaggaaacgggaggtcattgggctccatgttctctatgcctggaccatctcaaaagccctgttttttaaaggctgcttggagaaaatcatcccccaccaccctcagccacctacatctatatttgattaagcagcgcctccgcagactcaacatttgggagtaatttgacagggctgggctgaagtttgcttttacccttttgttaaagaaaaaattttctcttgagcactagcatttccctccaaagagacaagatgctaattatcactcttattcatttactaaagcaccctagtttgagtcactgtatgtgcttaaaagcaaaaaaaaaaaaaaaaaaaaaaaaaattcatttaaaaatagggtctaattcagagttttaagtgaatcagactcacctccctccaattagtccacattagttaggttttaaagttaatctgtagtgacggccagttcctcctactatctaaacaaagtccctgctgttggagagccagcctgtttcttctttccttgtctgtccttagggcaaacagagtgtagctggtctcgtctgaatgatttactctcagcacatttgaagaacaggtttctagaggggatttgagggcatgacaaaaatatagcatctcatggactagatgcagcccccagagccccacattgctggcagggccctgtcacctactggctgacacccttggcaacccccagcaccggggaattgctttccatgacaataaccatggcagccagtgcctggcactgctcacatgcattagttcaattaatgtccacaaaaaccctgggaggcaggtgctttccttactcccattttccatctgatgaacacagaggagggtgcatttctgttccagtgtcattctgtcctgtgcagacaaagggttaagcgtgtctttacacatgaagccagaggagtctttctcccctataattaaaccctcccggtgcgcttccttaactggatgtcattctgtgtgcgttgactatgaaggggactgtgctttgctctggtgccaacagggtctggggcatgtgcacctgcatgttcagggagtggggcacactcgtcccctaggactgtggcagggtggtttctctggagtccagccttcttcctctcactcgcaccctgctgtgacctttggctgggccgagttattgcacccgcaccctgctatggagtagtggcgagtgtgcaggacaggtgttgggcaggaaattttctctaaagattacacttcgagttctgagctgcaaggttttgagaggcagaaatgttgtttaaccgctttcattaacagatgtgtactaatgcagaagtggtcactgctaacaaatttgtaattcaaaagatatttaaagctcataggaatgccccaaagggtctgttaagtaaggtcagcaatgcttctggtcaagtccatcatctgtgacactaaaagggactggacaatcgctaaaggtctgttgcagtgtgaatgtctttagatattcatttaacaaacacgtataatgcttcttgtgtactgggtactgttctagggctttgaccaacagcagctctttccgtcttctttaccgctccatgaggtgaatactatcagccccattctgaggcccagggaggctaagaaacttggccagagtcacagagttccttcactgatgcctcaaggcttgaaagcaggcgaaataaccactctagagactgtggctctgcgcagggcctgagggataccttcccccagatccaggctttcagcccatgctcctaacctccgaggcagcctggctagagagctgggcctgattgaggagaaatcctggtagttacattctctgatgtcaaattcataaagggtaacttctcttaaaatcccagggtgaatctcgtgtctgtgagtttatcaaaatgcttccctacttctactttaaccctctttttggccagcagtccgtgaagatgacagttaccttcatccaaagggggcctctctcaggcatctgggctctgacaactccaacccaacaggatcactcttgagtcttaagtgttcaggtcttcgcagtttcccacacattcttggtggcccaactccctcaggaggaagacagtctcagggctatcactaataggccgcagaaggagctggctagtggcctggaggttaatttcaagtaaacaagagagaagcaggagccctgtggcattttctctggtttccagcatcctgtaagccctcccctggatgtccagaaccttctgtgtgatttgaccagcctgtggaggatgttctgacggccccttccaatgcactggtgaacccctgtgctgaaggactcagcaaggttatccctcaagccctgagaaacaagattttgttttcatcagtttccagccttggggcatcagtgagaagagctgagggagaagacgatactgacggagggagagcaatattggcacgtggctgctgggacagcatgtggaatagaattctgttttcacgtaatattgtttcagcagaaaaggtgatttcaggaatgagagatttcaatcagagtttctgtgtagtgatttgattctcatgttttcagatttttttctttaaattatcacaatattcagaacatattcataatttttcataaaatttatagctacaatgccagcatttctcttaggtggagccatatgaaattgtcaataggtgaccatttttacctacaaaagtggtagtttcataaggttaaacataagttcaaccttacatttctagaaaatctcttttcatggaattctaagctgtgccataaacatggtatcttataaagaaatcttaccttcacttgcaagtggtttggaggatgtgtagctcctgtttattttggaaatgacttaaagttgttgatatgggtctttttctccctgagtgattacaacttctcattctaatgatgggaaagtctacagtcatctctgccacttctaacgtggggtggccccaattcccctccattgatgattggaggggaatcgcttgttgtcacatcgaatcctagaaccctgtgagactggaaggaatttaatttgaaattgccgtgcgtaccagttctgctctgggctggagaaacaatcctgctgcagatccatctagtgacattaatctttctttgacttaatttggttttcatccctaaagtaggggcccagaggacgctccctgcctcacaggactaggggacgattaatgagtcactcttagaagagcatttggagctcctcagatggaacaaatggcatctttttaacactctgcattccagggcacttttcaaaaaggcatttctgtccttacctcagcagcagctgacttgtgctaaaaagaaaacggaaacctttcccccacaaacatctgtaaataaactatttttctgtctttataatcgtgttaaagtgtcacatgggggaaatgttccagctctagagcagctgtgaaagttagaaatgcactcacacatacgcgctcacacacacacacaactcatccactaataaaatgtttctacacttgctcttgggagataatttcagagtaaaatttccttggtacaagctgtgtctatgctatcttaatgcctgagcacagcactagcagcgggctgttgccagctcttgaggagacatttgaacttttggcagcgttccttatcagaaggcccatccgaggtatttgtgattatagagtaagggtgctcgcttttggcaaaacaaagcgtctgacagtagtgaagtactggctcaacactcaatgggagacatttgggattcattctttgacaattacccagaatgaatcatcagcttccttttataaaaagatatttattggcttagaaacagagcatatccagctcttcgtggggaggaattttgtaactatgttcaaagcttctcataaactcggtgtctgagtattgctaagggggtgcctgcacagagcatttagtttaattgcatcaaatatggaggagaattgaaaaatcagccagcaaacaatgaatagctcaaggggaaaaggagaggatgctcgttaataggagcagagtcgaagagctcagtaagagttaagaatccctgctggagtcactttgcagaggcctgatggccccagccggcccctgcccagtgctgcccccaccccaccaccaagatatcatgcacaccagcagttggaggcctctggcctaaacttagcggctggctggacagctgtgtttgaggacctcttgagggctggctcttgctctgtgttcctccctgtgggtgtaacctgaaggagattaggttttaatcctttggtgcttgctaggtgggctagtacattctgataaccaatgtgcagcaggccagaagagaaattctaggtttccactctttccaaactgggaaggcaaggtccaaattaatattagaattgagaatagctttggagcttcagaatggagggaaaagtcacttagctgataaggttcagaagtgacagggtcagtcctccagaaacagttccagaatgaaggagatttgtggatctctgacctgcctccttcttgccacccgtttgtcttgtaattttgtgaatgagcccctcctcccacagagccaggcctgcccccagcatcttggcatctttgtccccctttgcccgaagggcacttccttgcttggggatttgcgagtgcccatcagggtgtgggggaggggcactgtagggccacttgaccctggtttccatggtaccaaaaggtcttaggtgagaacgcttgattttaactccaaaagaggcaatatatacagaggcctgcctttgtcaaatgtatacatttaaaatctgtggcaattcttatcagttctattgaagcataatttttgagacagggtcttgctctgttgcccaggctggagtgcagtggcacaatcgtggctcactgcacccttgacctcccacgctcaagccatcctcctgcctcagctgggactacaggcgtgtgccacaatgctcagcgcttttttgtttgtttgtttgttttgaggagagatggggatctgagttctccgggctggtcttgaactcctaggatcaagcaatcctactgccttggcttcccaaagagctgggattacagtcatgaaccactgtgtccagccaaaatataattcatattaccataaagctaattcgtttaaagtatacaatacagtggttttaggtatacttatagaattgagcaaccattgccacaatctaattttagaacattttcatccctcccgaagaaaccttgaattcattaacagtcactccttatttcccccagccctgctttagccaactagtaatctacgatctgtctatataaatttgcccattttggacatttcgtatattctttttagattcgtgggtacatgtgcaggtttgctacaagggtatactgcatgatgctgaggtgtgggcttctattgatcccatcacccagtgaacgtagtacccaacaggaactttttcagcccttgccccagacccatccccgcttttggagtccctcatgtctactgctcccatctttatagacacttcatatcaataggaccatacaatatgtggtcttttgtgactggcttcttcgcgtgtttttgcagttcatccatgctgtagcatgtatcggtaattctttccttttattgtatggcaatttttggtagtatattcatactacatgaactaacacatagtaataatgaactacttgtagttgcaacatgaatacatgtcacagaccttatactgaccctcaaaatctagacacagtacatactgtatgattctatttatatgatacccaagaacaggcaaaattcataaatggtgatggaagacagaaaagtaattacctctggatgaagatggggtggtcattgtctcggaagggacaatgggagcacttttcaggaccttgcaatattttatatcttgataaaggtggtggttatgccagtatatatttaatgtgaatagtcattgagctgcacacttaatattagcaaaagttaagcatgtcccacattatgcttacatttcaaagcttttattaaaaagtatatgcaaattttgtgattttacaagcttttgaaaaaatgtcacaggttgaatatcccttatccaaaatgcttggaaccacaagtatttcagattttggaatttgcttggattctagaatatttgcatacacataatgaaatattttagtgacaggacccatgtttaaacacagaatttatttatgtttcatatacaccttgtacacagagcctgaaggtaattttatataatttgtgcacaaatcaaagtttttattgggttttgactgtcactcatgctatcatgagttcaggtgccgaattttccacttgtggcaccacgttagcacccacaacgtttcagattttggagcattttgaattttcggattagggatgctcaacctgtatatacctacagaaaaacaaataaattataagcgtactgctggatgaattatcatcaagtgagcatatcctgaaactaccacccatgtcaaaaaatagaagccctctcctggcctttcctaatcactaccgctgctctcttctccaaatatctaacatgatagttttgactgtttgggctttttcttttttcaagctctatgtaaatggaatcagtcagtatactttcttttctgtcgagcttcttctgctcaacattatgattgtaagatttacccatgtggcgtgtaacagtagtttgctcattttcattgttttataaactgttgtataaatatgccccaaattattcattctgatgatggatgtttgagttgtttccagtatgggacaattacaaatcgctccctatcaggatttatacttatttctgtggactaaggacctacatgtgaaatggctctgtcatagggtagataccaactttatataccacaatttctgaaaacccatttcagcatttcttaatagagtagtgtcatagtcagttcgggctgctataacagaataccattgactgggtggcttaaacatttgttccttatagttccagagactggaagttcactgtctgggcaaagtactagtagctcggtgaggaccctcctcctggtttgctgagagccgtcttcttgtatccttgtgtagtggaaagcagaggggaccagcaagctctgctgtctcttccttttcctcctctgtttagagacaaggtctcactctgtcgcccaggctggagtagagtggcacagtcagggctcactgcagccttggatgtctgggctcaagtgatcctctcacctcagcctcccaggtagctgggactacaggtgtgcaccaatgcgcccagataattaaaaaaattttttttatacagagggatctccctatgttgcccaggctggtctcaaaactcctggactcaaggatcctcctcttcttcctcccaaagtgctgggatcgcaggagtgaggcaccacgcccagccctggtgtctcttcttataagggcactattcccatcatgagggctccaacctcatgacttagtcacctcccaaaggccctacctcctaataccatcacactgggattaggatttaaacataggaatctggaggagacacaaacattcagtccatagcaagtaacaattttttaacctcaaaaaatgaaactggcctaggtcttgcctgacctctgtgaattggggggaatgtcctaacacagctcagtcttcccctcttccagggcttcccacctcccatctgtcccacagggtcctggcctccaccttctgcgtactaccccactgcctcccatggcctcatcagcctcctccacaggaccatgagccccttgaggacagagacactgccttgcttgtcatttagtcccagcctccagcacagtgcccagaacatagtaattcttgataaatatttgatttaataagtgacagcatgtaagatccatccagccatctaattcctgggtgaagttgagaaatccattaaattttgaacactcatatatcttttatctttggtttcagatatcaaatggatccactataaaagtctttaagaagatagcaaattttacttcaggtaaccaatataatattgttaaccttttgttctcacccagcttcataaagtattgctttttgcctctctcagctgtattgtcacaaaggtgagattgagttgttgctatgtaattctctgaaagttgagaaaagtcattttgatctctttgcagtcctaagaatgtgatccctgcaagaaggaaaggaaactatagatggtggttggcctggactgcccagcactgaggaagtggctgcctctttatagccctaaactcagggcagaatctcatagctttttttcaaccctttagaaggatggggcctaacagaggagatccccctggcaaactgagagggaagagtacagacaatcatcacagagccccgaagcaagcgctgaacaaacaagataatccacttagaaggtccaagtctcctgtgatagcacttgcaaaattcccagaaattggagagagacaaactaaagggggaacttttatgggaaagtcaataggctggtctctaaagtgatcttctgcttccctgatagccctggggcaggaaattcctgttccaggtttgtctccagagaaattataccccagtcaagacaatcagctctcagcccttggaaaggttctgagctcctcccaaacaggctcctttcacacacacagccagaggtagggcttcctgacttctggattcactattagaaggagcagggagcatctggccagtgcaaacagggaatgtggggttcttgattatacagacaggataattgggtaggactcctttggggaaacccaccttccatcactatatggggctgtggtgaagccatcttgcagagatcattccagcttaagggggatggtgtctttgtgttgaaaagtggaagagcatggtttttaggtttcaaagattgggccttttgaagagcctattatttggggattgaatagtagaatcttaggtttggatctcttcgtgggccctccagtcagtcaacactgctgctagtttccattcactgcaactgagagccaccgtcttacaccctgctaatactctaaacctcctgtacctctgtcctatcatcagcccctctgtcaaaatcccaacgctggatgaacccaacgattatcctttcctgaccctacagctagggagccacagaagaaaggcacataatggcacacagtgggtcactataagttcatggtacccaacttgaccagggccctccacacagcctgctctcattgggttcctctgggcaattcaactctgtgttgtccataatgtctgccttctctcctcaaagctttgacccacacagctctcctctcagcagatgacttcaccctgcactctttacagagaaaactaatcagaagtccttcaacagccagtagcaaacctaccaacctacctgcacctgccttcttccttgatgcttgtaggctgaccttcttccattcaaggccagtctctcacctgtgctttgggtccaccatcctttccaaccttcttggtatccttacaccaccagtaatctcttttctcacctgtactttcttttcctctccatctactccccattttccattagcatttcaagatgtgctcgtctctctcatctttatttttaagacagtgtctcgctgtcacccaggctgtagtgcagtggtacaatcatggctcactgaagcctcaacctgctgggctcaaatgatcctcccacctcagcctcccaagtagctgggattacaggagtgtgctaccatgctcagatactctttaaaattttttgtagaaatgaggtctcgctacattgtccaggctggtcttgaaatctggactcaggcagtcctcctgccttggcttcccaaagtgctgggattacagatgtgagccactgagcctctctcaactttaaaacaaacaaaccaaatgccttacttcctctcttccctccatttaccactcccttaccctttacagccacatttcctcactctgcgctactcttgacttgctctgtgagcaccacctcattgtcctttgagatcctagaaagggtcagctccttcctacctttggaccttcctgcaatttgcctagctgactctatctcttcattagattcagctcaagcatcccttcctcaaaaactcctggactagatttggtctcttgttaattctttagcatataattctccttcataacctttatcacagttataataattgtgtacctagaagtttgatgtctctcattggccagaatgcaaattccatcagggtgggaactgggtcttattcattgctatatgcccagtagtccctggcacataggaggtgttctaggtacatttgttaaatgaatgaggcttgagcctctcctaccagcaagagatcagagatcactagggaatctacttcctcctccaatccctcacccgtcccatcttcacgctgttcttaagatcttaagatgcagcagggggaaaaatgtagctatggagagctcaagtcaaaaagctcaagtaacttcagtatacagcacaaatggggccttttaagagaaggccgattagcccatggttgctttttttaatggactgctttctctccctctttctctggcattcagatgtggagtactcggatgaccactgccatttggtgagttcaggctttcttgtgctcaccactgaactgcatgccttctgtagcaagagtggtctccttgggtaacgcttctgctgtcttcccttcagattttaccagattcggaagcattccaagatgtgcaaggaaagagacatcgagggaagcacaagttcaaagtaaaagaaatgtatctgacaaagctgctgtcgaccaaggtacacttactgttctgggagcactttatggctacctagggggtgtatgatatgtttgacttaatttccactgaagtgtgaaaatgttacaaatcccttgtgccttctagcaaagcaaaatgaaagtttaaattgtaaacacttcctacccagttcctcttctttttatacactacaaagataacagcactttacagatttgtactgtagtatcttcagtcagggatttaatattgttcccagtctctttctccaccatttcactattattgttattttttaggttgacagcataattattccttttggtttacttgttattatagatgagcaataaaactccctttttgaattgcgaataaaatgaaggggatgggaagggtcaatgactataaacctagtaaatcttaatttttgtttttcattttaaaattaagaattctgctcacacataaaagtgtcagatgtgaaagccggtggaataccaaaccgagagcaaattttactttatctggcttttagtggaattaacagaagtctgtggtgatcttttttttcctccccctctggaatgatgagcactataaatgctatgatctacacttggccccaggaacttgatgggcatgcttcttcagattataacaaagaatctgcttagagcttaggagatttgtttagtgggcagaggacagcccaagcctcttgattttctcagctgtcccatagagcccagcctatttggcttttgtgaaatactcaaatgctttggaaagtacacaataaaactttatgatagaaatatatgcaacaggaaaaattctgggaacagagcagcatcacttgagcttttccaggctgaacataactaataaaagccaaatatccatggcttcctggtttatgtaaacagccctacaactgacatttcaactgctagagatttctgatatcctcccagttgactaaacaatgttatcagcaagaagcttatgaaccaaatctaaacctgggcatggattttcaagacttttgacctatactgtgagcactggccacatttgacaattttacatttttctcttcagtttgtttttccctgttttgaacattattttctctgaatgtggatttgcttttgctattatgttttcaaaaccactaccacagtttttaatctcccaaatctgatgttgtctatctttcaggtggcaattcattctgtgcttgaaaaactttttagaagcatttggagtttacccaacagcagagctccatttgctataaaatacttttttgactttttggacgcccaggctgaaaacaaaaaaatcacagatcctgacgtcgtacatatttggaaaacaaacaggtgggaatgtaggtgattagtgactgttttcaagaatctgggacagaatattaactaaaagaaagacatagatagttatagaaggattcatttatctctatatcagaatctttgggcttggtaagctatcatgtcaaagtagtttcttattctgttactatttttaaacaataaaggaaaccattcctatgccaagaatcctgttcttgaagataaactgttatctttggtgcatgatactttgtctagaatgttaaaagaaatttaagttgaccagtaaagaatgagaaattaacatttgtggttttatatcatttttgcattagagaaaattttatgataaaccattttttgttcctaatcggttactttgcagtctccaagctgtctatactctgattctgtacagaaatttatcaagtgcagtactcagatactatgagaattagccaaaagtttgtgttttgttttatattttaatattttaccttaaggacaggcaaggcatccaaattttgcctcctcagtaaagaaatgtagctcatgagctctctttgaaatgctgtgtgcatgggctggataagactcagagttatgatgaagtagaacttctcagtgcaagctcaaggctttccaggcactgagggcagccaggtcactttaaatgagtatcaaaagctgaagttcctctaggtctaatctcccatttaatccaggcctatcccaattctctacgctggcttgctcccttctcttcctgtgttctagcctctttttttttgagacagggtctcactcttgttgcccaggctgcagtgcagtggtgggatctcggttcactgcaacctctgcctactgggctcaagcaattctcccacctcagcttcccaagtagctggaattacacgagcatgccaccgcactcagctaacttttaaaactttttgtgagatgaggtctcactacactgcccaggctggtctcaaactcctggactcaagccatcctcctgcttcagcctaccaaagtagtgagattacaggtgtgagccactgcccctggcctgttctagcctcttatctccagtccctgccactcccacatcaagactgggagctgagggccaccattccaccttgaagattatggcatctgagcaggggcagcagccaggacagtagagctgttgggagacctagcagcatatgggggaggtaatgagctaggccagagttgaaaaggagataatggaaggactttgaaccagtcccaagttcatgttcgggtatttgagtacctactatgggccaagcagttagttgctggagatatagtaacaaaacagatgaaagtccaggtcccattctaatagttggggacagacactaaatgcaatatgcaaacagtagcacattagcagatgatgagtgcagtggagaaagtaggaaaggaggctagtatgtgtcaggactaggtgatctgagaaggcctcacagagatggtgacacttgaaccaagtcttgaaagaggagagggcataaaccatgagactacctgaggcaagaaagtttcaggcagacagacgccaagagcacaagttgtgaggcacgtgcttgcttggcccatatgaaaaatagcaaggagaacaggagagttggaatgagcgcggtgaggagcagtgggataggagggccaggtcatgcagggtgttatccagagggagatggagagcctcagagggttggagcagaggagagacatggtctgattctgtgttgagaggactgctgatagttatgtgagaacaaactgtcaggagatgggaaataatccaggtgagagagattataatcaagagctatctggagaaaattcttgcccatggccactttcaaacttaccctcctctatccttcttttacagtagctctgccagttaaccctttcttcttctctccaagtgacgcttctgtctgttgcttggtatgtttggctaagcagagttgtatacttcaataacaaggacaaaaacacccgtttacaaactgtgataaacagaccattggcttcatgaatggccctatttgaaaagagattattctctctttgaacagccttcctcttcgcttctgggtaaacatcctgaagaaccctcagtttgtctttgacattaagaagacaccacatatagacggctgtttgtcagtgattgcccaggcattcatggatgcattttctctcacagagcagcaactagggaaggtaaggcccagcttgagtatttcttgtatgcagtcttatgagtttgacatacttgtctttctgataagcattcaaataataaacaattggtctaaactacaccagctaaaaagagatagcaagggccactgtcaatttgctgttatttaaaatctgtctcattatttttaatctaatttttttaaagtgaaaaacaaaataattagccccacccaactgcagaattctgcctgtgaaaaactttatcacaaagtatgcgttttgtttcctagaaaaatattctatggacactgataaactattaacccaaaatatgcaaccattgaaatttgcctaaatcaattctatttgaatatacataaaatgcctatttgaatataacacattgcttatgggacacaaaatcttgctcaagatttctaacaataccagtttgtcagtttctaatcaaagcatgagtactgttttcctatggttttctttgctgatcaatagtcccaagaactcaaagaaagacaaaaatcagagcaaacttcgaaagagatgttttggtcttatttgagcgctccaaaatatactaaactgagcaatatctgtgcctaatggatctttgaacactgaggaggagttcttgggcaggactttaagagtacctggaatgaatggagactgatgttccacaggtgcctcagactcccagtcataatctaaactctttatcagcagtatttctgcaaaacaaacctgtttttacttttgtcttccctagcattgcctagtctctcaaggtagaatcctcaacgttatctttgactcctcttccttccaacctctatccccaaattattggttaccacttacttctgtctcaaatgtctgtcgctccctcctccttccttagccttatcacttagccttatcccttcatcccgtccctactgggataactgcttcctaattggtgtccttgcccctgctgtccacctttccttctaaacttttccttttcactgtctctcaggtaatctttctaaaacataaatctgatgatgtcagtctgcttcttaaaaattgcaactatttcccattacctaccagctaaagtcttcacagtgccacatagtgcttcctgatgggcttcagccctctttgctggcctcgttattttcttgcacgccccacatacccactgtgctacagcttttacttttcccaagttcacaccatgaacttgttctcacacccctttgctcatctttcctgtctcacagtccctctgtctagtaaaatcctacccattcattcatcataaacattttattcattcgacaaatatgatttcctaatgaggaccagaaactgtaggagactcagatcagtctacatatgcctactttgtgaactttccccaatatatttcctacagcactttcttcatttgactaataaagttcatcttagcatgcagcacactgaaaggcacttaaatgtttgttcacactaaaaacagttgtttatgaattatgttcttgacacacttcacttaatcctcacaagtaccaaataaggtagttattattaccctcattttatagatgagaaaattgatgttctgggaggttacaagtcttgcctgaaaccacacaaagtagcagaattatgatttctgatttgtccaactctttctgtcaactactgctgctaattatttgtatcatagtaagcacttcataaatctgtctttgcaactagattgtaagcttctcaagggcagccactagtctttatcattgtactctcaatgcctgctccagtgcttaataatgtttattgaatgaatgaatgatagcatgatttctgggttccacttaaatttgacaaatgagaaaatctcaataatatctcagtctctaggcatccttcagaatgattcatcaagccattgattcagcctcatgggctgggacattagccctatcattaacttacctatcttccctgagtagaattttttaaagttttgtgaaaaataatgatttttaaaaataaaatcatatttaatttttaaatatcactgttataattacgtagaatcattcaaattgccagagaacctctgcaaaatcacacatcagagccaccaatactaatgaccatgtgcttccctgaagaaactggatgatgtctataatctaatgaaataaaagggacaagctggaaaatctgcctctgccaattacttaccagtttcatggttatataaagggctcaatcagacctacaatcaagtcttttgtaaatgccaaattcactggtgggtgaggatgagagcaaatgttttaattcaggctttttacaaccattagtaatgaactatgattgaaataagttccattgttacagtaactcaaaatcatgcaaaaataataattttagttcttttatgagaggaaggcagaatatattagcatttaatctgcctgaaaataacagtgactcaccagaactatctagatagcagtcagtcattcagtcaacaacatttaaggcctactgcatgaagccttgttagcaagaggtaaaactggttggtggtgggggttcagctacattggaatattataaattcctccatctttttttttttttttttttactcttttggtgatggttgctttttttttttttttttccccaggaagcaccaactaataagcttctctatgccaaggatatcccaacctacaaagaagaagtaaaatcttattacaaagcaatcagggatttgcctccattgtcatcctcagaaatggaagaatttttaactcaggaatctaaggtatcattagaaagcagaaataagcttatatttggttactttacgtcatttcagaatctctcaacaagtctttcttttagaaacatgaaaatgaatttaatgaagaagtggccttgacagaaatttacaaatacatcgtaaaatattttgatgaggtaagattttaaataacattgtttttaacctttgaatcaggcacaaggatgtggttatagcattctgtcagtttcagaacagctctggcatcccaaaaggccagaaagggaagccaggaagcctgtctgagatgggggatcctggcactgagccagaccctgtacatggctgccccccttacagttttatcatgctgcccacatttggaccagcctgaatttacatttgagttcatggggcctacagccaccctgactcaagttaactttgatgagtaagtagtggccctattaaatggggtcagcttatgcttgattgtaatttgctaaaaatgaaagctaagcttgttaaattgcctagattctgtattcaatcgttatatgaaattatgacatatttctaacttaagcgactatttcaataaaccattctcctttatgattaattctccttaatctgggtttttttctttggaaattcaaacagacacattcatcagatgctttgtttccaaacaaatgttaactcccccttccctgattcccccccaatcatgctgggacaggctatccatgtcaatggtgagaatagctcaccaattccatttgctacttgaagatgaagtgaagctctaaggtagggtagaggcaatgagttcttaaacatgataagcatccctcgttccaggggtcaggggagagaagggaagcacgaggagggactacactgcccagatgggagggaagggaaggatctgtctctgaccaggatgtccctgcctgctgcatttaaggagaaatacttgcctgcatgttggctgcccaggaatgcttgctgtgcttggaatggctgtgacataatgcataaagcagggcctaggaagcctggccccatatttgtaagcaaatagttggtatttcttgcgagcttctattttaagccaaggtattgttgatcctgtgataaggacttagcaaaacaacttgcaaagtgagtatgtaaatgatggaagaaaatgttggcatctgtttcatacagattttaccactcacagcatcaggtatgcaaaaaacagaattgtaacgctaaaaccacaatatctaaaataactgttctaattgtcaacagattctaaataaactagaaagagaacgagggctggaagaagctcagaaacaactcttgcatgtaaaagtcttatttgatgaaaagaagaaatgcaagtggatgtaagcactctggggcctggcttaatctggcaaagttcttcagacgacttgggagcaaaatggctgcttgagctactctgtgtcgttaatttgttgtttgcacataggttccactttgggcactgtctttttaagagaccaaggcacatgcacagcttttagaaagcataccaacccttgtgcctgtgtgtataccgtgggaacccttctgtaaatagagttgaagtggttgttgcaaacagcctccttgtttacagagaatacaaggccagtaagcgaatgtcagtattgtaactacagtctccacttaagcacaatgatataagtggttttgtttgaaaactacagctatgtagcacttgtgctacactgcacctctgcattgtaaagggatactgccagtgctcaaaacaaaatgtgaaatgagtcatttggaaacaaggtgggggtgttagggcaacctcgaggatttgcagcattgaaactttccccagtagttcttggaaaagctgaccgcagaatttggtagtgtacacttagcatttgtgagtgtgtgtgtgtgtttaaaccaaaaactaacagtgttgcaacattgttgaaagggctcgtgtttttcagtggtcatcaactgcactccatcaaactcacctccatttcaccaaggagctctaaagtaaggagagtgggctttatttaaatgaacagcattttaaccagatactttgtcctaatgtatgttccttttcttcatctgttttttcatactaaatgtatttgatagtggacatgttggatattatacaaaaaaatcattaattcatttctgttccaaaacctttgatcagaacgatctgtggaagagtaactccatttctatatgagtgagtgtctccttgctttagatttctggtgaaccctgtggttatgaatacttgtgtgtgatttaaaaaaaaaaagatacattttacatttcatcgaattgctgttcacactggagtattatatataaatatatatatttgaggcccaaggcctgaaaaatattagtatacaacttggtatcttagtcttactatgtactttttgaaagtattcctcgcaggagaaagaatttaaaatacccattttattcatgcctttctttttaaagaattctctatccagttatactgtagtctttttagtgctgattttttaattcctgaatttttgctgctcatgaccagttttaataccactgtgttttccttctattaaaccagaagaagtaaacagcataattggcaactcttgagcttttcttgtggcaggcaccttttacccttggtgctccaaatcccccatctaggaaagaaaattttttcaagtcaaataacattgatcacatattccttgaaatcatttaccaacactgtatggagcattaggatttaaatatgaatttgtcttaaaggcaattcctttttgcttctgtattatctggaaaagcatgagagaggtgacacctcaacaaactgatcagagaaaataagcagttactaccctgataggcaccttcccaatcctgttgcttttgaccattgtctgtccaacggacacacctcaaacaaacaaaactaccaaatagatgacagatcagaataaaggtgagaggtctggtccccattgaaggctgctacagtcttcaaagaggtgaaggagttcataagagaacaacagtaggaaagttgagagccaagggtaggagagttgcccaaaagacttcccctactactttagggtactgaaaactcaaaggatcagctacagctttatctaagtatttactaaatgctacatgagggtgtccctgtccagctttctggcacatgagtcctgtgtggagagttacctcctcttccagggactgtgctgttgggaactttgggcaagtcacttacctctttgtgcctcaatttctgtataatatttctaagctacctcactgaggtggtatgaagattcactaatgtatgtagcgtgtttgtcaatcctccagtgaaaagcactatctagatcacattttggatcacattagccaaatgcagtaaatggccaaattagatgtgtgctgaagacaatcagtcactgggtctatattaaacagcaaccagagcaacaaatggcaaacaatttctattttcaagtttctttgcatatttttttggtgcaaaaccatttataaacttttttttctaacactagtgtctacagcagcattcaaaaaaattctgttaccttttctgtattaggatttaaagtctatttcttattgtatacctgattgaagctgttcttggagatgaatgttttaaatgtctatatccaaaaaataaacattttgatgtaactgtggactgtcttttttttttttcaattttctagttataatagtttttttattctaagtggctccgtggaaattatttttcagagataaggtgtcactgtatatgctgtgaataagcagctatattatgtagtaagtaaacctagtttgctaaatggtgctaaggactgctcaattacagtcctggccttcttcactatcaactgggacttttgactatgaacaccttgggataatgaacattccacttaatttgggagacttgagctttagcctcgttaacatgaaattattccagcagaattcctctaaaagatgtcacattaaaaaggcttccaatgggtgtagaccaaaaaaaatgagagcatacttagggacacaaaacacataattatttggttagatccacagtaatgggaagtaaagttaaataccaacaatgtttataaaaggacctgagttcaagttttataatcaatggcccccttgttaatacagccataggatttaattatttgcacttattctctattctaacaaagccaaaatcagtagactgtcatattgctaaatatatgctatatggttgatgtaaaattaaacacacgattaaaaaaaaattaagctctttaattatgtgcacacagattttagaaaaggtagccttttgtatatagatacctttacattctttaggctgacttttaaattgtcatcttttttcaactacagtttttgtatatagtaaaccagaagatgtgtatggaccctgttatggccaagcatctcaaagatgaagagagaattaatgatagttatatttcactcaaaatgccaaaaaaaaaaattcaacaaagtaaaaattttaaaacttgactctaactagttcctttttgttttacattctcaaaccattgtcaaatattctaaatatctctgagaatttctcttttaatgcttcacttgtataatcttaaaatcctgacagtcatacaatacagcatgtagtaggtaccttttcttgaggcacattcaagtgttttggcaaacagtaaaaagtatctaaatgccacaggttaaaatgtcaagttttactgagtcaccaacttcacctcttttgatctgcctgttctccaagaacatcattctccggaagatccaagttcctctagttgttttctttgtgttgtttccagttcttctagtcttttgcgaagtagagagagttccctttgatgttgttcctccttaaaatgatgtagagaaagcatagcaaaagaaactattagaaaaactgttaggtagcaaccttggactgcctcttttatatatgcctataacatctggcaaggaaatgctgaccactgtagcagtctaaaaacagtagcatgggctaaactaccatctagttttgcttctctcctgcctcaggctctagccttaagcaaaacccgtagtctgttcttctctaggtataaaattcaccagggagtgaattagaaaatactaatgcagggcccaggtatacttacatggtaactttccaacaacactggtgtttaacagcagtttattataaacaaagcacttggcctgagattcaattcagtgattaaaatcttctgtgcttatgttataaaacataattacttattaatactcccatcttctgaaaaagaatcaatctgattccttcaatacctcaggggcttgatacaatagaaagagcccgggttttggattcaacaggtttaggtttgaaactttgtcacttattagctatgaccttatgcaagtcacttcactctgaatcagtttccttatctatgaattaggaatagtaatatctgccctcaaagcatttttcgttagtattagacattgcacggaacatgcacagttcactgcgttagtaaattctcagtagtaattactattaacattatgaataagctacaaactctaggttactcaatgactcaatcaagtttcctcttttctatcgtccagtaagagatttcactctcagcaccaacactaaaggatcatgattcaaactgaattcagcaaatttctatgctaaatgaaagggaagaagttaaaagtagttttaaatgtttatgccatttttgtggtgaattttgagcactgaccaaagttataatttgagttttatcaccatatttaaacataaaaacctacaaaaatgtacgactttttttttccccctaaaataaatgctcatacctgcatatgaggaggaaatggtagttccatgcttggaaccatggctgatgactgaaagctaacaggattgatagatgctgttggaggcatgttaggaaccaaaattagacttcgaaattcattatgtcttctctgtatatcttttagtcttttttgaagccttgtatagtcttcaaaaggaacattttgtcttaaaaagaaaaagaaatgtttctttaacatggttataccctattgaagcacagtatgattcacagaatataattttaaactggaatttctaaattatgagatctatatataatatatagataaaaaatctgtttacctagaaagataaacagaaacatgacataacatcttaatcattagcaatcattagcattgcagactatcaactcattataaagttttatttgctaattaaagatctaaaatcttttgatactttggtactcactcctaccctcctactcacccccattcatgaatcctgaaactaaagggagactctaaaccaaaagagtgccttatcttacagaaagaatcaaataaaaatacagttcatccctcagtatacacatgggattagttccaggacatccctcatatatcaaagcctgtgcatacaagtcctgcagtcagccctgcagaaccctcataatggaaaagttggttctctgaactggtgggtttcacatcctgtgaatactatattttctatccatgtttgcccgaataaaaatctgtatataagtagacccatgcagttcaagcccatgttgtcaagggtcaagtgtaaagaaaatgctggattgaagcttacaaaattgccatttttaaataggtgaaatatggtcaaatatagagattttcatagttcaatctaattttcaaaatgtcagtgtaatattttagtaagaaatatatatttggtctttgcccttggttcctggcacacagctcctaaaactctgggaaactctgaagtgataagagtatcttttgtatattaataagataactggtggctgggggcccctgaatagcttcaggatggggcaggtcaccagaaagactgaggcatgattagagggttggaactttcagccccactctccaaccccaccccatgacatctgggaaggtaaaggactaaaggttgagttgatcaccaatggccaatgatgtaatcaatcatgcctatgtaatgaagcctccataaaaacccaaaagcatggggtcagagagcttctgggttgctgaacatgtgcaggtgtctgcagggaggcatgcccagagagggcatggaaactccacacccccttcctcataacttttcctatgtatctctttcatctgactgctcatctatatattttgtaatatcctttctagtaagctggttaacataagtttccctgagttctgtaagctgctctagcaaattaactgaacatgatgagcaggtcatgggaaccccaatttatggccatttttagccagtcagaagcacgggttacaacttggggcttatggctgcattctgaagtggggggcagtcttgtgggactgagccctctacctgtgggatctgatgctaaatccaggtagacaggatcagacctgaattacaggacacctagctcgtgtccactggaaaactgattactccatgtataggaaaaaaccccaaacatctggtgtcagaaatgttgtgttgactgtgtgagaataggaaaaacactggtttttcctattataaaaggtaatcacaaaggtgaagctacacaactttaggaaaaaatgacatggagaaaaaggctaactttccaggccttcacagatcatcatctttttggacacgacatccagtaatcaaatataatttcaaaatcactcaaaattctagatgatctgcaccacaactggccaatcttgaattgctaacatttcaatattaatgtttatggaagaggaagtaagttgaattctgttttagaaggactgagccaggaatggtggctcatgcttgtaatcccagtgctttgggaggctgaggcaggagaatagattaagcctaggggttcgaggctacagttagctatgatcgtgccactgcactccaccctgaaccatagacgaagaccccatgtttaaaaaaaaaaagaattgaaacaaaattcaaaattacaagcatgtttgtaatttacaaattactaccaaattaataaactaaaggcggcctcctactttggaatagagtattgtaaggctggcactaattctacagtctagaaacttctagaatgttctttaaaaaacaattgttcacctgttggtaataattgcacccaagaacaccagtgcacatcataaaacgtcactgcatgatattataggcagtttccattacagaaaaatctatacttgaatagccaaggcgctgaaggctaccactaattcactaaattaaaaagatttttcttaacttgaatcaaatgtgtcatataatgccactaccaacaacttaatatgacaaatctctgctttaaaaatgctgatgatcctgattatcagatgtgcttgaatgtgactgcaaaacccgaaactacagctcaataaaatctccacaccaggaaaccaaaactgacctttgattcaaagttgtaggcacaattttcagaactatgcaatagctacaactgtcttgtacagcagcaacaactaacaccactccttgctaccaaagccagtgacattttctgttagtcccaatcataaggcaaacacctggtatgtgacagagaccttttggtttaaagaaacattcagttagggggtaaaaaaaggatagtacattaggagttatcaagctgttttagaaatctttaaaatgtatattttaaaagaaaagaaggtacgttatacttagagacaaagttctatgacatcaaaataaccacatggggaagatacacatacaaacacattacctatttaagacctgattttctgtttccaattcttctttctttgcctccaagacttctactttctcttgtagtcttttcaatttgttttcatgaagagattttctctaaaaagagaaatatgaacaagtatgttaatacataatctcttatttgaacaaaactatatagaaaatattttactcaccaaaaactgtgtttagatatgaatgttttcagtgaatactagaaacaaaggttagtagacatggctcttactgaaaattgcaaagataataaaccacaaatctatctaatattctcaatgtgacaattaattatgaatgccaaacaaaaaaactgttatcaataattgctgcaaaaaaaaaatctacaaagggaaggagtcaaattttactactgagtctgcctgtacatctggtaagaaataatgagctctccattgttccagaagatagcatgtgtttaagagaactgagccaggtacagtggctcatgcctgtaatcccagtgctttgggaggctgaggcaggaggatggattaagcctaggagttcaaggctacagttagctatgactgtgccactccaccctggacaacagatcaagaacccattaaaaaaaaaaaaaaaaaaaagggtggggagccaggcacagtggctcacgcctataatcccagcactttgggaggccgaggcggacagatcacaaggtcaagagattgagaccatcctgaccaacatggtaaaaccccatctctactaaaaatataaaaattagctgggcgtggtggcgggtgcctgtagttccagctactcaggaggctgaggcaggagaatcacttgaacctgggaggcggaggttgcagtgagccgagattgcaccactgcactccagcctggcaaaaaagcaagactctgtctcaaaaaaggaaaagaaaagaactgaagtaaaattcaaaattacaagcacgtttgtaagttataaagtactaccaaattaataaaactgaaggatcagaaagctaagataaatatggatgcatctgtttaaaagttgcctttctaaatcttaaaaggaaaaaatttaaactttacaatatacaaagggagaaattcctaagtaaatcttgtatggtttcattaaacaatacggaaaagtccaggtaaaatgcaaaaggagtgtatggaaaaaagtagtattttttttcagtttttatacacaggccttttgttttttaatagaaaaacacctaaaatgttaaaactcatttagtcgctacaaaccttttaggtattttctaactcttttttaactgaagtataatcttacagcaaaatgcatagaatagaaacgtaaagctcaaagaaaaaccacaaaacaaatgctggcatgatttccttgtaggtcaagagcactgccatgccagaagggcccctacctttcccccttccaatcactagccctgtcatcctctgaaagggtaaccaactaatttacttccaaaactatagtttacttttgcctatttttgaacctcatatacatacaatcatagtatgtagtcttttattaatgactttatttcactcaacattgttagtgagatttatgttacttacagatatacttcattcattcccacatattatattccacttacgattattgcataacctagtatattcactcagtacaccgttaagggttatctgcattatttccagttgggactattacaaataactctgctacgagcattcattctcatgctttgattgtcccacatcctccaacatctcagaaggcttccttatgctcctgtctaccctggcaaaggaaccactcttctggtttttatcaccataagtatttatttatgaatttataggcagttaaggagtccatctgtctatccatccacccattcatatgaaagaaatcataaatttatgctcttttgtatctggacttttttctcaacattttatctatatgactaagccatggttatgtattgtcacagtacttctttttcattgcaatgttgtcattcattgtacaaatataccacattttatacattttcctgttaatgaaaatttaaattctttccagtctggggatatcataaatattttacgaacattcctaaacatgtttttcgcagattaagtacctcattctcttcagtatatacctatgaatgggtcatagtgtatacatgttttagctttagtagatactgccagttttctaaagcagttttaccaattacatttccaccagcaatatgtgagagttctagctgttctacatttttgccagtacttggtatggtcggtcttttagcttttgcatcctgttttggtgaaatacagtatctcactgtagttttaatttacattttcctgatagctaaaggtattgagcatctttttttatgcatgttagtcatctggatatcccttctttgtgacgtgtccatcctagtcttttgtccattaaaacttttgagtaacctgattcctactgatttgtagttctttatatattcaagatatgaatcgtatgtcagatatatatgtattgcagattgaccttctccagcctgtggtgtcattttcttttgcttaagagtatcccttaataaaaagattttaatttaaataaaatcaattacatcaatcatgtattttatagtaggaactttttgcatcctgcttatctttattatcccaagatcctaaaattttctcccaagttttcatctagaagctttattttttttttttacctatcacacttaggtgtatggttcatttttatctatgttgtgaggttaggctgagtttaatctattgactcactactatttgaaggaacatcctttatcgaaatgcagtggtacctttagtgtaaacctatttctggactctatactgttccatttgcctgtttatccttatgccaataccacactgaattactgtagcttatatttagtgttgatacctggtagttttaagtcctctagttttattgttcttcaagattgctttgggtattctagtcctttgtactttcagatgaattttagaatctactttctaatttctacaaagaaacctgctgagattttgattagaactgcattcaacttatggataaatttgggaagaactgacaccttaatattgaatcttccaagtcatgaacatggtacagttttccctttaggcatttttccatttttcttagcagtatttgtatttcagtgtagaagtcataaacatctttcactagatttgttcctaggtattttaggtatttttatgctattgtaaatggcatttaaatattttctaattgtgtgtgtaaagaaaaataactagtatttgttacttgacttcgtacttagaaattttaaaaattcatattaattttaatagtttgataggtttgacttttatgcatgcacagtgacatctgtgaataattttaaattcctgtctactctttatgtccatttctttattcttaaaactttttttaggctcagaggtacatgtgcaggtttgttttataggtaaatagattatttcatcacccaggtactaagcctagtacccaagttattttttctgatcctctccttcctcccatgctccagtctcaagtaggccccagtatctgttgctcccctttgtgt

SEQ ID NO: 716 - DNA, 5119 bp, Homo sapiens
gcgaggaggaaacggtgccggagcgcgcagggcttgctgccgccaccgccgctgcacaggctgccggagcgagcctgccgcgcgccgccctccccgctctccttcctgggcgagctgcggggatggggcggccgcgggagcccgagcgcgcgcaggaaccgccgccgccgccgcccgcgtctccgttgccgcgcgcctgagccgccgtcgccgccgcgcgccctgcccgggggcggcccccccagccccatggaggtctcccggaggaaggcgccgccgcgccccccgcgccccgcagcgccactgcccctgctcgcctatctgctggcactggcggctcccggccggggcgcggacgagcccgtgtggcggtcggagcaagccatcggagccatcgcggcgagccaggaggacggcgtgtttgtggcgagcggcagctgcctggaccagctggactacagcctggagcacagcctctcgcgcctgtaccgggaccaagcgggcaactgcacagagccggtctcgctggcgccccccgcgcggccccggcccgggagcagcttcagcaagctgctgctgccctaccgcgagggggcggccggcctcggggggctgctgctcaccggctggaccttcgaccggggcgcctgcgaggtgcggcccctgggcaacctgagccgcaactccctgcgcaacggcaccgaggtggtgtcgtgccacccgcagggctcgacggccggcgtggtgtaccgcgcgggccggaacaaccgctggtacctggcggtggccgccacctacgtgctgcctgagccggagacggcgagccgctgcaaccccgcggcatccgaccacgacacggccatcgcgctcaaggacacggaggggcgcagcctggccacgcaggagctggggcgcctcaagctgtgcgagggcgcgggcagcctgcacttcgtggacgcctttctctggaacggcagcatctacttcccctactacccctacaactacacgagcggcgctgccaccggctggcccagcatggcgcgcatcgcgcagagcaccgaggtgctgttccagggccaggcatccctcgactgcggccacggccaccccgacggccgccgcctgctcctctcctccagcctagtggaggccctggacgtctgggcgggagtgttcagcgcggccgctggagagggccaggagcggcgctcccccaccaccacggcgctctgcctcttcagaatgagtgagatccaggcgcgcgccaagagggtcagctgggacttcaagacggccgagagccactgcaaagaaggggatcaacctgaaagagtccaaccaatcgcatcatctaccttgatccattccgacctgacatccgtttatggcaccgtggtaatgaacaggactgttttattcttggggactggagatggccagttacttaaggttattcttggtgagaatttgacttcaaattgtccagaggttatctatgaaattaaagaagagacacctgttttctacaaactcgttcctgatcctgtgaagaatatctacatttatctaacagctgggaaagaggtgaggagaattcgtgttgcaaactgcaataaacataaatcctgttcggagtgtttaacagccacagaccctcactgcggttggtgccattcgctacaaaggtgcacttttcaaggagattgtgtacattcagagaacttagaaaactggctggatatttcgtctggagcaaaaaagtgccctaaaattcagataattcgaagcagtaaagaaaagactacagtgactatggtgggaagcttctctccaagacactcaaagtgcatggtgaagaatgtggactctagcagggagctctgccagaataaaagtcagcccaaccggacctgcacctgtagcatcccaaccagagcaacctacaaagatgtttcagttgtcaacgtgatgttctccttcggttcttggaatttatcagacagattcaactttaccaactgctcatcattaaaagaatgcccagcatgcgtagaaactggctgcgcgtggtgtaaaagtgcaagaaggtgtatccaccccttcacagcttgcgacccttctgattatgagagaaaccaggaacagtgtccagtggctgtcgagaagacatcaggaggaggaagacccaaggagaacaaggggaacagaaccaaccaggctttacaggtcttctacattaagtccattgagccacagaaagtatcgacattagggaaaagcaacgtgatagtaacgggagcaaactttacccgggcatcgaacatcacaatgatcctgaaaggaaccagtacctgtgataaggatgtgatacaggttagccatgtgctaaatgacacccacatgaaattctctcttccatcaagccggaaagaaatgaaggatgtgtgtatccagtttgatggtgggaactgctcttctgtgggatccttatcctacattgctctgccacattgttcccttatatttcctgctaccacctggatcagtggtggtcaaaatataaccatgatgggcagaaattttgatgtaattgacaacttaatcatttcacatgaattaaaaggaaacataaatgtctctgaatattgtgtggcgacttactgcgggtttttagcccccagtttaaagagttcaaaagtgcgcacgaatgtcactgtgaagctgagagtacaagacacctacttggattgtggaaccctgcagtatcgggaggaccccagattcacggggtatcgggtggaatccgaggtggacacagaactggaagtgaaaattcaaaaagaaaatgacaacttcaacatttccaaaaaagacattgaaattactctcttccatggggaaaatgggcaattaaattgcagttttgaaaatattactagaaatcaagatcttaccaccatcctttgcaaaattaaaggcatcaagactgcaagcaccattgccaactcttctaagaaagttcgggtcaagctgggaaacctggagctctacgtcgagcaggagtcagttccttccacatggtattttctgattgtgctccctgtcttgctagtgattgtcatttttgcggccgtgggggtgaccaggcacaaatcgaaggagctgagtcgcaaacagagtcaacaactagaattgctggaaagcgagctccggaaagagatacgtgacggctttgctgagctgcagatggataaattggatgtggttgatagttttggaactgttcccttccttgactacaaacattttgctctgagaactttcttccctgagtcaggtggcttcacccacatcttcactgaagatatgcataacagagacgccaacgacaagaatgaaagtctcacagctttggatgccctaatctgtaataaaagctttcttgttactgtcatccacacccttgaaaagcagaagaacttttctgtgaaggacaggtgtctgtttgcctccttcctaaccattgcactgcaaaccaagctggtctacctgaccagcatcctagaggtgctgaccagggacttgatggaacagtgtagtaacatgcagccgaaactcatgctgagacgcacggagtccgtcgtcgaaaaactcctcacaaactggatgtccgtctgcctttctggatttctccgggagactgtcggagagcccttctatttgctggtgacgactctgaaccagaaaattaacaagggtcccgtggatgtaatcacttgcaaagccctgtacacacttaatgaagactggctgttgtggcaggttccggaattcagtactgtggcattaaacgtcgtctttgaaaaaatcccggaaaacgagagtgcagatgtctgtcggaatatttcagtcaatgttctcgactgtgacaccattggccaagccaaagaaaagattttccaagcattcttaagcaaaaatggctctccttatggacttcagcttaatgaaattggtcttgagcttcaaatgggcacacgacagaaagaacttctggacatcgacagttcctccgtgattcttgaagatggaatcaccaagctaaacaccattggccactatgagatatcaaatggatccactataaaagtctttaagaagatagcaaattttacttcagatgtggagtactcggatgaccactgccatttgattttaccagattcggaagcattccaagatgtgcaaggaaagagacatcgagggaagcacaagttcaaagtaaaagaaatgtatctgacaaagctgctgtcgaccaaggtggcaattcattctgtgcttgaaaaactttttagaagcatttggagtttacccaacagcagagctccatttgctataaaatacttttttgactttttggacgcccaggctgaaaacaaaaaaatcacagatcctgacgtcgtacatatttggaaaacaaacagccttcctcttcgcttctgggtaaacatcctgaagaaccctcagtttgtctttgacattaagaagacaccacatatagacggctgtttgtcagtgattgcccaggcattcatggatgcattttctctcacagagcagcaactagggaaggaagcaccaactaataagcttctctatgccaaggatatcccaacctacaaagaagaagtaaaatcttattacaaagcaatcagggatttgcctccattgtcatcctcagaaatggaagaatttttaactcaggaatctaagaaacatgaaaatgaatttaatgaagaagtggccttgacagaaatttacaaatacatcgtaaaatattttgatgagattctaaataaactagaaagagaacgagggctggaagaagctcagaaacaactcttgcatgtaaaagtcttatttgatgaaaagaagaaatgcaagtggatgtaagcactctggggcctggcttaatctggcaaagttcttcagacgacttgggagcaaaatggctgcttgagctactctgtgtcgttaatttgttgtttgcacataggttccactttgggcactgtctttttaagagaccaaggcacatgcacagcttttagaaagc

SEQ ID NO: 717 - protein, 1556 aa, Homo sapiens
MEVSRRKAPPRPPRPAAPLPLLAYLLAAPGRGADEPVWRSEQAIGAIAASQEDGVFVASGSCLDQLDYSLEHSLSRLYRDQAGNCTEPVSLAPPARPRPGSSFSKLLLPYREGAAGLGGLLLTGWTFDRGACEVRPLGNLSRNSLRNGTEVVSCHPQGSTAGVVYRAGRNNRWYLAVAATYVLPEPETASRCNPAASDHDTAIALKDTEGRSLATQELGRLKLCEGAGSLHFVDAFLWNGSIYFPYYPYNYTSGAATGWPSMARIAQSTEVLFQGQASLDCGHGHPDGRRLLLSSSLVEALDVWAGVFSAAAGEGQERRSPTTTALCLFRMSEIQARAKRVSWDFKTAESHCKEGDQPERVQPIASSTLIHSDLTSVYGTVVMNRTVLFLGTGDGQLLKVILGENLTSNCPEVIYEIKEETPVFYKLVPDPVKNIYIYLTAGKEVRRIRVANCNKHKSCSECLTATDPHCGWCHSLQRCTFQGDCVHSENLENWLDISSGAKKCPKIQIIRSSKEKTTVTMVGSFSPRHSKCMVKNVDSSRELCQNKSQPNRTCTCSIPTRATYKDVSVVNVMFSFGSWNLSDRFNFTNCSSLKECPACVETGCAWCKSARRCIHPFTACDPSDYERNQEQCPVAVEKTSGGGRPKENKGNRTNQALQVFYIKSIEPQKVSTLGKSNVIVTGANFTRNITMILKGTSTCDKDVIQVSHVLNDTHMKFSLPSSRKEMKDVCIQFDGGNCSSVGSLSYIALPHCSLIFPATTWISGGQNITMMGRNFDVIDNLIISHELKGNINVSEYCVATYCGFLAPSLKSSKVRTNVTVKLRVQDTYLDCGTLQYREDPRFTGYRVESEVDTELEVKIQKENDNFNISKKDIEITLFHGENGQLNCSFENITRNQDLTTILCKIKGIKTASTIANSSKKVRVKLGNLELYVEQESVPSTWYFLIVLPVLLVIVIFAAVGVTRHKSKELSRKQSQQLELLESELRKEIRDGFAELQMDKLDVVDSFGTVPFLDYKHFALRTFFPESGGFTHIFTEDMHNRDANDKNESLTALDALICNKSFLVTVIHTLEKQKNFSVKDRCLFASFLTIALQTKLVYLTSIVLTRDLMEQCSNMQPKLMLRRTESVVEKLLTNWMSVCLSGFLRETVGEPFYLLVTTLNQKINKGPVDVITCKALYTLNEDWLLWQVPEFSTVNVVFEKIPENESADVCRNISVNVLDCDTIGQAKEKIFQAFLSKNGSPYGLQLNEIGLELQMGTRQKELLDIDSSSVIDGITKLNTIGHYEISNGSTIKVFKKIANFTSDVEYSDDHCHLILPDSEAFQDVQGKRHRGKHKFKVKEMYLTKLLSTKVAIHSVLEKLFRSIWSLPNSRAPFAIKYFFDFLDAQAENKKITDPDVVHIWKTNSLPLRFWVNILKNPQFVFDIKKTPHIDGCLSVIAQAFMDAFSLTEQQLGKEAPTNKLLYAKDIPTYKEEVKSYYKAIRDLPPLSSSEMEEFLTQESKKHENEFNEEVTEIYKYIVKYFDEILNKLERERGLEEAQKQLLHVKVLFDEKKKCKWM

SEQ ID NO: 718 - DNA, 5898 bp, Homo sapiens
gcgaggaggaaacggtgccggagcgcgcagggcttgctgccgccaccgccgctgcacaggctgccggagcgagcctgccgcgcgccgccctccccgctctccttcctgggcgagctgcggggatggggcggccgcgggagcccgagcgcgcgcaggaaccgccgccgccgccgcccgcgtctccgttgccgcgcgcctgagccgccgtcgccgccgcgcgccctgcccgggggcggcccccccagccccatggaggtctcccggaggaaggcgccgccgcgccccccgcgccccgcagcgccactgcccctgctcgcctatctgctggcactggcggctcccggccggggcgcggacgagcccgtgtggcggtcggagcaagccatcggagccatcgcggcgagccaggaggacggcgtgtttgtggcgagcggcagctgcctggaccagctggactacagcctggagcacagcctctcgcgcctgtaccgggaccaagcgggcaactgcacagagccggtctcgctggcgccccccgcgcggccccggcccgggagcagcttcagcaagctgctgctgccctaccgcgagggggcggccggcctcggggggctgctgctcaccggctggaccttcgaccggggcgcctgcgaggtgcggcccctgggcaacctgagccgcaactccctgcgcaacggcaccgaggtggtgtcgtgccacccgcagggctcgacggccggcgtggtgtaccgcgcgggccggaacaaccgctggtacctggcggtggccgccacctacgtgctgcctgagccggagacggcgagccgctgcaaccccgcggcatccgaccacgacacggccatcgcgctcaaggacacggaggggcgcagcctggccacgcaggagctggggcgcctcaagctgtgcgagggcgcgggcagcctgcacttcgtggacgcctttctctggaacggcagcatctacttcccctactacccctacaactacacgagcggcgctgccaccggctggcccagcatggcgcgcatcgcgcagagcaccgaggtgctgttccagggccaggcatccctcgactgcggccacggccaccccgacggccgccgcctgctcctctcctccagcctagtggaggccctggacgtctgggcgggagtgttcagcgcggccgctggagagggccaggagcggcgctcccccaccaccacggcgctctgcctcttcagaatgagtgagatccaggcgcgcgccaagagggtcagctgggacttcaagacggccgagagccactgcaaagaaggggatcaacctgaaagagtccaaccaatcgcatcatctaccttgatccattccgacctgacatccgtttatggcaccgtggtaatgaacaggactgttttattcttggggactggagatggccagttacttaaggttattcttggtgagaatttgacttcaaattgtccagaggttatctatgaaattaaagaagagacacctgttttctacaaactcgttcctgatcctgtgaagaatatctacatttatctaacagctgggaaagaggtgaggagaattcgtgttgcaaactgcaataaacataaatcctgttcggagtgtttaacagccacagaccctcactgcggttggtgccattcgctacaaaggtgcacttttcaaggagattgtgtacattcagagaacttagaaaactggctggatatttcgtctggagcaaaaaagtgccctaaaattcagataattcgaagcagtaaagaaaagactacagtgactatggtgggaagcttctctccaagacactcaaagtgcatggtgaagaatgtggactctagcagggagctctgccagaataaaagtcagcccaaccggacctgcacctgtagcatcccaaccagagcaacctacaaagatgtttcagttgtcaacgtgatgttctccttcggttcttggaatttatcagacagattcaactttaccaactgctcatcattaaaagaatgcccagcatgcgtagaaactggctgcgcgtggtgtaaaagtgcaagaaggtgtatccaccccttcacagcttgcgacccttctgattatgagagaaaccaggaacagtgtccagtggctgtcgagaagacatcaggaggaggaagacccaaggagaacaaggggaacagaaccaaccaggctttacaggtcttctacattaagtccattgagccacagaaagtatcgacattagggaaaagcaacgtgatagtaacgggagcaaactttacccgggcatcgaacatcacaatgatcctgaaaggaaccagtacctgtgataaggatgtgatacaggttagccatgtgctaaatgacacccacatgaaattctctcttccatcaagccggaaagaaatgaaggatgtgtgtatccagtttgatggtgggaactgctcttctgtgggatccttatcctacattgctctgccacattgttcccttatatttcctgctaccacctggatcagtggtggtcaaaatataaccatgatgggcagaaattttgatgtaattgacaacttaatcatttcacatgaattaaaaggaaacataaatgtctctgaatattgtgtggcgacttactgcgggtttttagcccccagtttaaagagttcaaaagtgcgcacgaatgtcactgtgaagctgagagtacaagacacctacttggattgtggaaccctgcagtatcgggaggaccccagattcacggggtatcgggtggaatccgaggtggacacagaactggaagtgaaaattcaaaaagaaaatgacaacttcaacatttccaaaaaagacattgaaattactctcttccatggggaaaatgggcaattaaattgcagttttgaaaatattactagaaatcaagatcttaccaccatcctttgcaaaattaaaggcatcaagactgcaagcaccattgccaactcttctaagaaagttcgggtcaagctgggaaacctggagctctacgtcgagcaggagtcagttccttccacatggtattttctgattgtgctccctgtcttgctagtgattgtcatttttgcggccgtgggggtgaccaggcacaaatcgaaggagctgagtcgcaaacagagtcaacaactagaattgctggaaagcgagctccggaaagagatacgtgacggctttgctgagctgcagatggataaattggatgtggttgatagttttggaactgttcccttccttgactacaaacattttgctctgagaactttcttccctgagtcaggtggcttcacccacatcttcactgaagatatgcataacagagacgccaacgacaagaatgaaagtctcacagctttggatgccctaatctgtaataaaagctttcttgttactgtcatccacacccttgaaaagcagaagaacttttctgtgaaggacaggtgtctgtttgcctccttcctaaccattgcactgcaaaccaagctggtctacctgaccagcatcctagaggtgctgaccagggacttgatggaacagtgtagtaacatgcagccgaaactcatgctgagacgcacggagtccgtcgtcgaaaaactcctcacaaactggatgtccgtctgcctttctggatttctccgggagactgtcggagagcccttctatttgctggtgacgactctgaaccagaaaattaacaagggtcccgtggatgtaatcacttgcaaagccctgtacacacttaatgaagactggctgttgtggcaggttccggaattcagtactgtggcattaaacgtcgtctttgaaaaaatcccggaaaacgagagtgcagatgtctgtcggaatatttcagtcaatgttctcgactgtgacaccattggccaagccaaagaaaagattttccaagcattcttaagcaaaaatggctctccttatggacttcagcttaatgaaattggtcttgagcttcaaatgggcacacgacagaaagaacttctggacatcgacagttcctccgtgattcttgaagatggaatcaccaagctaaacaccattggccactatgagatatcaaatggatccactataaaagtctttaagaagatagcaaattttacttcagatgtggagtactcggatgaccactgccatttgattttaccagattcggaagcattccaagatgtgcaaggaaagagacatcgagggaagcacaagttcaaagtaaaagaaatgtatctgacaaagctgctgtcgaccaaggtggcaattcattctgtgcttgaaaaactttttagaagcatttggagtttacccaacagcagagctccatttgctataaaatacttttttgactttttggacgcccaggctgaaaacaaaaaaatcacagatcctgacgtcgtacatatttggaaaacaaacagccttcctcttcgcttctgggtaaacatcctgaagaaccctcagtttgtctttgacattaagaagacaccacatatagacggctgtttgtcagtgattgcccaggcattcatggatgcattttctctcacagagcagcaactagggaaggaagcaccaactaataagcttctctatgccaaggatatcccaacctacaaagaagaagtaaaatcttattacaaagcaatcagggatttgcctccattgtcatcctcagaaatggaagaatttttaactcaggaatctaagaaacatgaaaatgaatttaatgaagaagtggccttgacagaaatttacaaatacatcgtaaaatattttgatgagattctaaataaactagaaagagaacgagggctggaagaagctcagaaacaactcttgcatgtaaaagtcttatttgatgaaaagaagaaatgcaagtggatgtaagcactctggggcctggcttaatctggcaaagttcttcagacgacttgggagcaaaatggctgcttgagctactctgtgtcgttaatttgttgtttgcacataggttccactttgggcactgtctttttaagagaccaaggcacatgcacagcttttagaaagctttaaaccaaaaactaacagtgttgcaacattgttgaaagggctcgtgtttttcagtggtcatcaactgcactccatcaaactcacctccatttcaccaaggagctctaaagtaaggagagtgggctttatttaaatgaacagcattttaaccagatactttgtcctaatgtatgttccttttcttcatctgttttttcatactaaatgtatttgatagtggacatgttggatattatacaaaaaaatcattaattcatttctgttccaaaacctttgatcagaacgatctgtggaagagtaactccatttctatatgagtgagtgtctccttgctttagatttctggtgaaccctgtggttatgaatacttgtgtgtgatttaaaaaaaaaaagatacattttacatttcatcgaattgctgttcacactggagtattatatataaatatatatatttgaggcccaaggcctgaaaaatattagtatacaacttggtatcttagtcttactatgtactttttgaaagtattcctcgcaggagaaagaatttaaaatacccattttattcatgcctttctttttaaagaattctctatccagttatactgtagtctttttagtgctgattttttaattcctgaatttttgctgctcatgaccagttttaataccactgtgttttccttctattaaaccagaagaagtaaacagcataattggcaactcttgagcttttcttgtggcaggcaccttttacccttggtgctccaaatcccc

SEQ ID NO: 719 - protein, 1556 aa, Homo sapiens; identical to SEQ ID NO: 717

SEQ ID NO: 720 - DNA, 124233 bp, Mus musculus
  misc_feature (1)...(124233): n = A,T,C or G
tggagcagaataaggtagaagatttctgagaactatgtagaatggagaagtgtttctgcatggtgagtgcagatgggattgtgagcctgatggtctctatcaataaagattgacagctacagtctgtgtgcaccactgacactgttttgctgaaatgtttcatgttaggtagactacctctctcattgacaaatatggcacccttgtcctgccaagtgttcatagcatccagttttgttgtgacaaaagagatttcctttagcataccccttctccacttctgaatgttcccagagcactactgagcagatgtcaacctttgaacctatagggctgagggaaaaggaagcttgtcttagtcagggcttctattcctgcacaaacatcatgaccaagaagcagtttggggaggaaagggtttattcggcttacacttccacatttctgttcatcaccagggaagtcaggactggaactcaagcaggtcagggagcaggagctgatgcagaggccatggagggatgttctttactggcttgctcactctggcttgctcagcctgctctcttatagaaccaagactatcagcccagagatggtcccacccacaaggggcctttcccccttgatcattaattgagaaaatgccttacagctggatctcatggaggcatttcctcaaccgaagctcctttctctgtgataactccagctgtgtcaagttgacagaaaactagccagtacagaagctatagcctgctgccaatcccagggacctcttcccagtggtacccagaggattcaggttataatggccagagacaagagatagtgtcagacaaggtgtgggcagaagagatggcatgtcactgcccactctcaaaagcaaggtgaggctatgtcatttataaatacccatcactttggaccaatgtctgttcccctttctggcttagttcaaggacacatttgacaacacttatacttgacacaaaaatagtagtcccatctagcatattcatatttgccacatcttgtgcatagcattcaaagagtggcagccattgtctgtgtatcgatgggggagccaggtagaatggagggcaaggagcctgaagctatggagctctgtttgcatcatatcacacaggctgctgtccaatgacagcaaggagattcctcagtctcactagttctctattaagcagacctgcacagctaagcgtccatttgacttgcgaacaacgtacaaggtctcttttagtcctaggtagctttcttagatcctaaaagccttaatccaacaaaaatgcattttttcttgttcttcccaaggtgggtgggtgatgaagtttatctaggagcagtattagcagcatgtctaggctggaaacagtaaatagatcattgttgagacagtttttgaaacctaagtgtattcccatgtgagtgattctaggacagagttcaacagcaggtgctgcagtgtgactctagactctccgtgactgtgcacacgaggcctcaggagatgcttagctccaactcgaaagcccagcatgaagctcgggctctgactacacagagactggggagctggacttcttaaccttccttccacaaagtggttctgaggcaggcactgcacaggctagaaaacaaatcaaccatggctgtcgagtgctgtttgttagagcagaaccctctctggctgggtttaactgagcgcgtagaaccttgggacatcttaaaggcacaaagcgtgcattcccagatctgatgcgcagtgaccttgatgccgcgtgtgagaggactgggcagagagaggggcaaaggggagcagtcaggactttggattaactgtgacgctgggcaagtcattacccccaccccccaccccggaggccagtggagctggtcttgaaggtctctggatattctgctctagttgttattctatgactctgaacccaaccctattattagattggagagaccaaagtattcagtgatacggctgatacacaaaaatactcaccgaattactatgtgtctgaatcacttaattaggggctccaggcactttctattattatgactactttttccaattcatgagatttgaatagtagagagaactagtaactttcctaaggtcatacagcctataagggactatatttgaatttaaaagtttgtagtccaatttttggataccttacattgctcatacatcacagactgggtagagttccccactatcctcttggaaacaaacatcaccttcctctattttgtggcttttggaagaccaaagtcatcttcaatatttaagcaagttcccaggggccagtatttttgtgtttacattggatgctggcctctgtgactagtaagttatagacattctatagttcctaatagcatagtcttattgcttctgggtcctggttgtagctcatcagtgtgtgcttgttctgttattttggccaagatacagagcttctgtccccatcagtgccataagactccagtgtcctagcatgcctgtgtttggtagacctaccaaagtcacaaggttgtcggttccggaagaattcttgggaatggaggggcagaggaaagagaaaatgagcatctggtagaaactggcttgtcttccttgtgccttttaaagaagctgcttctcgggtctcatccgggagaggaaggggaaaatatttattcacccattgtttctgcttgccattgttcaaagttgtccacatattatttcctgtgcctttgcaaggggctcatgtgtgcacaacaaatgagccccacagcatcccacacttccggctccatgaagtcctgtggcaggaaggagaagtggttgagagttaaggcgctgtcaagttgtgagcatggcaaatggtggatactgcggtgacttcagtagccaaggctatacagtggccacagcaaatggccacctgggggcaggaaatgataaaagagggtgctcagggaagctggagaggccagagatgtgccctgggttgtacagtccacctgtgagctgcacaaagttgttcccagtcaagaacagatattggtcttaaacagaagtccccacctctgtggttgtaatttccatagtttcagatacctgcagttgactgtggccctaaaatatagatggataattccttggcttctatttcacactaccatgtgcacaccatctacctcacttcctgtcaaaacgagacattgcatcattccatgtcatcacaagagaaggatggagtatgtattaaggagagcgcagtggagagggagggggcagggcagagagagtgaggaggaggaggaggaggagggttacagcaaggtgagggagagagggaaggctacatccacaggcttttattggccatgttgatgtgactgctctcatttatctttatttcatgcttttgactcttttaccgtgcctaatccatatagtacattttatcaaagtcatatatatgttgtttttttttaaatggtgcgtgtggggttctgatccatctgcaattccaggcatccactgggggggggggtcttagaatgtaccccagagataagagagaatggttgtactgttgcataggacctttcattttatgggaacacaatgttcttcatatattttaagaaaagagatgaaagactggtagtcagagtcccttgtgagaccacggctaactgacatctctgcaaagccagagagtaaaggcaactccatccccagctgagcctcctgctgcctcctcctcctcctcacccactctagattccctttgttctcagcccactcttcagatgctctggccagtttgcctggagagacggtccagacttcttcatccttttgaagtttagtctcatgcttgctttgactgctcttggacctcctggccatcatcctgagttccagaagcaccagaaatcgtctaggttgttctctttatctatatgtgtcttctgcctgtacaaagtagcagctaggatggctcctggtgcccattgagcctagctgtcctccccctgctccccatcaacacacactctatttttttgcctgttagtccactgtcatgagaaactcaaaatggtctagtcaagccacagcttcaagattcatggaagcgctattccattggacaaacttttctgctggatgccaccaccctgacctgtgacagcccaggctttcaatgtttctctggacaaggaaaaaaaaagacttaatcccaacatgctcccttgattttcagacccaagtatatttggtcctcctatctgtgggctctgcatctggggattcaaccaaatgcaggttaaaaccagacattctgactgtactatgtgcatacttttcttgccaatatcccatgaacaagagagagagagagcaagcacatgcatgtacaggtcgcaataataactaaatttagaccatggatttgagagagaataaggagaggtcttgggaggagttggggggaggaaagggaacggaaggaaataaggtaaaaatttaaaactaactaaacgaagtatgtaggagggttgcatagatatgcaagtattatgacattgtatatgagaaactcaagcagttttgtatctggtgtcagaagttctctgtgaatactgagggacatctgaatcctagatccttaagacagggacggcaaatcagcgtcagctgttttggtcctggtgaggaagactccctccatctgtctgttaccagggtgatggctgggctttctgaggggtgtcatggagatctcagtgtgggcatctgtggccagtgggatagacaatcagcatcgtcagtgactagacatgcttcagaggggagggctccataccgctggacaagaaggaagactgactgacctcctcaggacactggttgcagagtcttctctgtagtaggtggtctgtagtgagcagtgtgagatgcataggcttcgggcatatggaggccagcccacattcctcttccctatgttttcttgtgtgtgtggtgggggtgggggctggtggtatctgaatggatgcttgcttgtgtggagaccagagatcaactttgagtgttccttatgttttgagacagaatcccccactgaacatagatctcaccatttgccattgcttgtagtcgggctctccaacaagcccccaggatccaccagtctctgtgctggggttataggtgctcacaccacactgggtgtttatgtggtttttaattccagtcctcggacttatatctcagataccggagctgctaacatcccctcggccctccctgggacctcctgtcctgaatcagccatccttgtctttcagactgctggccatcatccaagaccaacttctcaggcctctctctaaggccactcctccctccttcagggaggtaggccagcacacaacctaagggtgtaccaagagggagggttccttcacggtcactatggagggagatacagttgtatgtctacaccccatgaggacctgcacagcaccctcatttatctgcaacacagctcagttctccccttcccttgctcactggttacagtaaaccacccacgaagctggagatgggagttgaagaaggggccttggtataaagcaatagaggacacaggaggctgcctacctgctcccatggtttgtttacctgtgtttcctgtaccgttggggcctaacctcaagtacccctgtacactgagcttccggcagagcctttacatcagcaacttgacttctgcaggaaaagtcagctgggcgttcctgagacttctttctcactttgcaatagaaaagcagaagccatccagaccccagaaagtactgagggcagcagcagtagcagcaccaggacttaaaaggagaaggtgtgccaagttcctggaaaaatccaaatggaccgtggcatacgatagcaactcaccctgagctttgccagatggtagcatcaatggtagctgcaaggcagatgcagtgtatttcctggaactgatcagcacagcctttggcagtgagttgcaggatgatcctgcaagtggggtctcagggaaggatccaagtgtgctttcacatagtaaagatgggaatgtattatagtgttttatcctgcaggtacatggactcttcagtgtgcgctatcatgtaacccataggaatgcacctctgtagtgcttgtccctctcctatgttgatgacatcatactaaccggagcctgtgagcagtgagtgatagacacctcagatactgggtcaggcacatgaatgtgtgaaagtgtggaagagaaattcccttctctcatcctaggctccccagacaacagcatctggggcaagtcttaggtgccactgtacagtgagtatcatcttagagaacaggggtgaagtcctgtggtagggaaaaaggaagagcccattagaggcattagctgtgtgcattgtgagagaacatttcaaatgacttgagaaattccacaaaatgtggctggaggtgtagctcaaggggaagagtgctcacctgctgtgtgcccagcaccaggagtatttcctgtaagggggtggggggggggagaaggaagagaccaagagtgagaggaaggttaagaaattactgtttttgaaacacagcatctagaagaaaaaaagaagtattagccattttccattggctaaaaaattggaagggggaatttaatcctatcatgcttgtagacagaataggctccagggccagagaaagcattcaggtaaagagatgtaggtgcagccaaggaacaatggccactatgcacataaatgacaagagagaggaggtaggaacacatttgacagggcactgggtgtttgcttatgcaccctctctcctgttttctcttgcctgtctggcttgtcagactttcaaatccatcattatgtgacatgctgaacaacacgttttctaagcctcctctgcatagacactgctgaggtctcctcagagtacaagcccctcctgggcagcagacgtatgcagaacagttgtggttttctcctggtcatccaagaggcagccctcttctctggctactttaataagttcacttctagcaggctagtgaactctgccttttctgtccattaatcagatgcacaaggcaggctttgtgtatctcctgtgagataccaaagacacatcctacccacatactgaagaaagtccagttcagaatgccgtgcactgagtcttggtaaccttttctcggaccaggtctggggtgctccttccaggttccagtgcccttccagctgctggagacagtctgaagaatgcccttgcagacagagcctcctggaacatttggctggattataggaaaatggacagtctactcatttagtcaagttctggagaattcaggacattaaatccccagtctccacacgtcccagtcttgcagattggcctgaaccgtggtaaacaatttagactagctggggtatgacatgacgcttccttttggctatttctacaactccacattgaatggaaggaaatcacttaagccctcgcagcactgtctgacaggaggtggaatgcctcacttggcttcctgccccatcagtcccacacccacaggggaccctctcccgctccctctcagctcctaggcctgagatatctccggtcttaggccataactcccaccttcaggccaaatttcaacacaacaatcttgcttgccttttccaggtgaaggagaagtaaaccagtacgatcggccaggttctgtttccagtcaccacatgagagaagacccaaggggatctttgtctttagatttcaaggagctgggtctcgggtgcttacctagaaacaacaaatgtgtacacaggacttctctgagagggcggtaaaggaatctactgcagtatccagcactgatgagttgaaccacagtcaagccccatcagctgaatacaggatgtaccttcctcctggggcaggtcaggcttgtggcataaagtcatcttatatgtgtaaccaaactgtatctgtgtattaaacataagctcttccctatctcatttagacacggccgtctctccatagaccccttgtttgctcgtttggaacagggtggtaagctctcaatccagtttcactctgacttatgagcaaagacagacttcaagtgtggtattaagtaggactggtcctttgtcttgttgatgggtgaagcagaaaatggtggcaaccatggtaaactggaggatattgcccaactgatgaaattccaataaaatctgacatcaaaaatgcaggttccatgtcatcaggtctacctgaattctaatagtccacaaatttggtttttcaatttgtgtgcatatatttgtatgtacatgcatgtaggagtgcccacagaggccagaggagggtgttaggtcgcaggaactagagttgctggtgattgtagcctactctatgtgggtgcctggaccttgggttctcttcgagagcactacatgcttttaacccctgagccatccttccagccctacaaaatatggatcttaataaacagttcataattataaaatgttgttattattaactttttaatttggaagctatcactgaccaaacttatctgcggaccacatggagacccaggccacctgtttatagccactggctctaactgtcaaacagaacaaccttgggtgcgacaatttccttaggtaaatctatctaggaagtcagttacagatctggctggtgcattttacaagtaatagagaaatccagacccaagaaagccaattccccatggttaatcatttgtaacaagtgttatacccatcacagaaggcacaaaaggggaacgagagttcaaatccatagacagggtgaacagatgtcaaagccaccttaagtgggcagtatccttagaatgccccctaacttccttgttagttccttggagccctcctggcttccggtgcctcggtcccttaaaagccaatggctctgcctgtcttgacccttgtggtgtgtcctcacccccacgtttcctgcagtgcactagttagtaactgcaagagctcctaaggatagcgtttttcaagagctaagctcccaattcctgccttctgtgttgcttgttagttaaagggtgtcttgttcccagcgggcaggtaacacacctgactctatgtgcctaggtcaacattgagaccttactcttttcttcaatgttgattctcttgtgtggctcactggatggatgccttggtaaatcgtttggcttctctggacttcagttccccttggtcaaggttttgggattccaaaatattcagagcacaccccacgagtccttcaaagtcctcgctctgtgtatgacttccgtccccaccgtgttactctggggcatgcaagtgggatcttggctggcctgctgggtgtggcacagcaaccaggagcgacttcaaccgcgtagctttgggacactgccactcccctctgaatctcaatagcctagtctgtcatgtaaggaaaccccagcgatcccagccggccctgggttgtggagctctgcgtctgcatgcggggctttcctcgcgggttacataaggctctggggtggcgggaagaagggggcgtggggaggcgcagcggggaccggcggcgaggtggggcaccgcgcgtgggggagcgcagggcgcggcggagtcgggtttcagagcgcgggtgactcaggcgcgggcagcagcggggatcccgccgtcgccaccgagcgcagcctttgttccgcgggcgaagtacagctggggtccggcggctgcaccatgacacacaggtaggacccgcgccccgctccccctgcaccttcgcctcacctcctagccgccgcctcaccttctctgccaccgcttcttgcaggaggaccgcgcagggccggcgcccgaggtggctgctctccatcatctccgcgctgctctccgctgtcctgcagacccgcgctgcgacaggtaagccacagccgcttgggtttgcgcgcccgggtgctacggcgcctcattcctggacataaaagggagtacttgcttggcgcggcgcacagccgtcttgccctgggtcctcccgggccccccgggttcctaggcgctgagatgattgcctcagcgaaggcacacaagagtgtctgggctggacgtggctcaccagagcgggcagagaggggttttagctgtacagtgacaacacactgccaaactatcccaaagcgcgctgggctcccgcgctgaggtcgtgcgcactgggctgtagggtgagcaggtcccatgtacactcagtccatgggaaaacatggtcttcggcagggataccttgacatcctagtcgttcctgacataacagaacagagtcgctagcgtgtttggttcagcctgagtcactagaggtccccatccctgccggacagaggcgcagtggatgatggactaagcctgagaaactgatctttctttctcttctatgggcctcagtttcccctgagaggactcagaagctgttggattaaagtgggtctgacttaaagtcgaactgccggtgtgaattgcgcctctgttgggtgactgtgggcaacattttttcactctgcatgcctcagtttcctcatctgagaagatctggtaaactagaccctcattgttccagaagcgttgagaagtgtaacggacagatgggaaataatgtcctttccatgagaataagtgtcggaaagataccttgctcttctcaggagtgcctgtgttggaaagcattgttggggaggcttaggaagtggcaactatgaaagccagaactcaaacccagttgggcaggttcctgtccctgctcagcctttgcattatgtactcagcaaaaccaggcttttggaacaacagccctgacccgctttggacttagagaagtagcgcatagcccagttgaaaacagtgaaggcggagaagtgttgtatagtcccctaggaagctggtccaggattggtggtcttgtttgactccgtagttacttgaaaatgcctggtatcactccgcccgtgatctgcaagggagcaaggcgcagatgcaatgatagcttttcctgccagggcgcccagcctggtgtttcttgcagatcaaagggcagttggagcagagttctggcttctcccaaggatagccagtgtggaaaccttgcaatttcccatatgacatagggctttgccaagtcagcagcagagggcagctgatgacatccaatgcccctttgggatttgaagagggctcctggagccctgagctgtatagatcttgcatgaggtttacacggttaattcttactcagccttgcattgaatgaggtctgaatgagttcctgtctcagtcactatcccaggagctggagactaaggacttaagatatcctattctgagcacactgaatccaagtcctagctttctaagagtctagagtaggatttgatccaggtactcttactccagagactttgctgtcaaccatcaatcaaaagagtttcccagacagagatggccttaaggtcccccagttcccggtgaatgctctaaagggagtgtcctcctcatgagaggagtccggtccacctccaaagctcttatatcctgctgtgcttcccatctccttactaagagaagaggcccaggaggggctgcaattatcctaaagccactcagttgttccaaggtagttgtaccacagttgttctgtggtagactgcaagtctgtgggctctgagggacattccccctcagggccacggttcaactggctgttaggaaaagaagagggaaggaaggaaggaagnnnnnnnnnnnnnnnnnnnnaaagaaagaaaggaaggaaggaaggaaggaaggaaggaaggaagaagacaagaaaggtttgctgaacatggtggcacatgtttgtaatcccagcatttgcaatgctaaggcaagaggattgtcagttcaaggctggcctgggctacttagctagactatatttcaatggacacacccccccaagcctttatagctttataggcaacagcagagttcacaccagccccatagatgcggcttcacagacagcgataccaaggctcatttgtccatgagcacttggccttcattggtagaagtccagctggaagaatctatgctcttgaccactaaactaaatggttaagcttgtgtcatttccccagtagctaggcagcttcttaaatactaaatattgattacaccaccatctagtgactctactcctttaatgtctattcaagtgaaagacaaatcatatgcccactcaaaaacttttatgtagccgttcataatggcattatacataatggcaaagtatagaaagaagctgggtcattaactgctaaacaaatgaataaatcatggtatatccactagcgaaatattattcaacaataaaaagtgagggagcacagacccatgctacagtatggtaagtgaaggtggccaggtaaaaacctgcaagttacccgagtccactaacaaacttccttaaaggggaaaaagccacagagatggaaggtatccttaattgcttaggcctaggggagagagcaggggtgactaaaatgggcagctggggactttgtaaggcctgggctgaggtgctgtgctgccacaccgatgccttacctcacttcactgtcttcagcacgagcaacactgcagacctcagcaaacctgcttaggaaaacaaaaacgaatgcactttgcagacatccaatctcaggtgggtgaaacttcttgtctggttcccggacatagagcctgcacatgggtggccacttccagactgccagccccatcaagtactggctgccttgggaaggctgttctgagtcctggctgctcctctgggtttccagctctattgtctgtgctgtccctgaatgccaccataggcaaagctcctatggtggggatggaacacaggcatatggtaatcttcagatagtggatttattactaagtagatctttgctcctccatgacccagttttgaggattggaaaacccaggctttatcatggacccattctttcagtaagctgagatgactaaagtctccttctgagcctctattttaccatctctgagatgggatggcaagatttgctcagctctgtgtttcttctagttttgaacactggacaataaaacagtatttacgccatctggttcagcaaacagattgagcacacactcagccaggcctcctgcagactgggaataggaaggagccaggcccagatctcccctaggaggctctgagtttacaggtagaaagaaaaggtcacatctcattccatatttctctcatcctgagggctcctccgtcatggcctcttgtgtttctgaagggtcagggcaaggctgctggccaacattgcaagctctctcccagtgaaatagctggtttgaaatggctgctgttttggaggttggaatggctgctgaagcaggtattgttgtgcctgttaataaggtactggtgtgttcaaatcatctgcttcctttgctttctcctgagggaacaccttcacctaagagtgcgccttgaaagtccagcccagctgaaatagtaggaagcagaacacccgaggttttgacctgccctggttaggggtggggttccctacctctcaggggtgattgtcacctggacctttatagttgtcagatctgctcattgaaaaaagaagacaacctaaacgcacatccctaaatgcctgggctctatcttatttgactttgagccttttccacaagggatatatttttcagtttctagttttctctgaatattaaggttttgagattcctgtgtgaggcaaattgtttgctctgtggtataatagtgccctccgtgactgtacctgctgtgagttttccgttttattttcagcagcacatgggctgtcatgtacctgtggaatctgacagtggggtatgactgttgtcgtgtgcatctcaggacatgtgtgtaggaggcattttctttagtttcctatccagatggggtgcagggtcacaggggtgaatattttccacataagcaggtatggctggcatgcctttctctgttgtgggcatcaggaagtgagagtccccatcctcacatcccggccagcatctggcctcatcactgcatttaatgtcaacatttctaacaggcgccaggtagaatcctaatgaagcctgtatttgtattttcctagctcgtgcctatgtgtatgtgtttctcttctctctgtgtgtgagtgtgggtttatgtgtatgtgtgcacaccatcatcttgttcttttaagacaaggtctctcacctgtcagtgtagactgtctctcacctgtcagtgtagactgtctctcacctgtcagtgtagactgcctgtccagctagccctagggagctacctgcccagtactggtgttacagtgtacactagggtcagtttttaacatagatgttagggatgtgactcaggtgctcatgctggtggtagacacttcactcacggacacatctcgccaggcttagttgatcagtatttcgtatgtttatgaaccatttgtaaatcttgactgttaaaaaactgatgtgaagcagggcagaggtggcacatgactttaatcccagcacttgggaggcagaggcaggtagatatctgagttcaaggccagcctggtctacagagtgagttccaggacagccagggctatacagagaaccctgtcttgggaaaacaacaacaacaaaccaaaccaaccaaactgatgtaagactattttaaaatatggacacagggtttcttactgaacctggagctcagggattaggctagacttgctggccagccagcccaggaatcctcctgcctcagcttcccagcaccaagatcactgatatgcactgctgggcctggcttttatgtgggtctgaggcttcagactgtgaagggaagcccaggcagcacaaccagacactgtctcaaaggctgtggtttcgaggatctcccaaactattctccatgggggtttcatccttttaggttcccaccaacaacacgtgcggggtttgcacagatgggcaacacttcttcctctctattgtttttgtagccacctgagtgatgtggagcagaacctcaccgtggtgtgagtgagtgacatggtgtggcatctccctgtggagtgtctaagtgacatggagtggactcgcccacccgagaacagaatgaagcagagggctcattcttgtatatggagatggatctctcttaatcatgccactctctggtttacttgccctgacagtatctaagatgcacttttgcttcttgcttcagggacccacctcctcaacagacagagaacccattggcttaagctcatgatggacagctataggtttctgaaagagatgtttggtgccaacatctttctgcccagacaccccccttctaaacatgcttctgttccccttcatctggcaccccaccttcccttaggattctgctctgggagtcacccctttccacttaagccttttgagtgcctctcagtggcagggcactcagactgtatggtgaccactgacagctcctgcatcccctgctgcacaagaaaagtcacaagacaggcccgggccttatctaactctgagccccagaatctaacacagagactgccacacgtggatgcctagtagggctttttaatgaatcaaggcaggaaggaacgtgtctatctgacttttcctctagtatagtgtctcaccatatcctccatggtacataagccatgccaaacctcagccctgccaactgtagagtaactgggtaatcagagaattctaagggacttgcagtctccttccataactttataactgagctgtctgggtttgaactcatgtcagcccactccttgtcagttctgattgtataagctaggcgacccatttatttgctgactcatttatcctcttatttctaatggtcactgtactctagggcagaacaatcatctttcctcttatggataaatttctgagtttaactttgatggcgaccacgcagtccatttgaaatgggccaaagatgaaggtgtaagctgcagtcagttttattctacatgggggtgagaattcctaagtcacggagtgtgagttgttgcccaaattgtgttgtttccttatacatgtcttaaaattttaacaatataaatttaattctttaatttctatattactctttactttcattcaaaaacatttgtgtgctgcctgtgtgtgtgcatgtgtgtatatgtgcatgtatttatatgtgtgtgtgtatgtgtgtgtttaaacccacatagctttgatgattgttgtcttaaaaccagatcagggaagtcacctcggtttattcacttagacatggattctttttttttaagatcatgtatttatttagttatttacttattgtgtgtgatatgcacacatgccacagaggatttgtggaggtcagaagacagctttcttcttggttctcctttcccggggatggacctcaagccatcaggcatgggtgcaagcacctttaccccagagccatctcaatggtctaagccatgacttctttagtaggttggttgttagatcattgcctcaggaaatgattgggctcctggagtacactggtgtgggtaagtgagggtggacaaagctagtcagtctcacacaattcaatgcgagacaacaatagctgaggagaacgcataaacaaatgcagggctttgtagttggagcatgtgactgaggggtgggaactggtgctgtcagcagagcccaggaaaaccaagatggtgtcaggggtcttcttcagaggagtcatgtttgctagctgaccagattctgctcatcattaatgaaaggacaaacagtctaaggtaagagtagaacctacaagaaggtccaggcctattcctgagcagcatagaatgaggagatgatggaaccagtggacttcagtgagtgcagcccacgtgacttctccataagactttactcagttctactcaactaagcccaacccaaccccatccaacaaaactaatcagttctttagtccaactgaaccagcatggcataactgattccatctcaacccaactcaaaccaatccatccaaattcagctcaagtcttttcagttcaatttaatgtcatctcattcagtacaagacaacacaactgtattcaactcagtatgacccaactcagacaactcatcccaacccaactcatcagactcaacacgtcctgatcctcttcagtctgtttttgtatccatggtaacatggagacataaaagaaagagaactgttctgaaaggactactctaaagtgatcaggattccagctttaggacttagggagcacacttttggatttgggaagcttggctggagtctggcttgcaggtagtagttgtgggaactgacatctgttttgatgagggtctcaaagaaagaccagctgaaacgtctctcaattatattctctttaaactagcttcctccccaaaggatctcctgacaatgtcttcagatggcccgcccttctgtcatagctgcttgtggagattactgtcttctccccataattcctggctgtcctgttcttttagggacctctggagtggaggtggggtagttagagaggcagattcactgtccctcctgggagagacccactggaggcttgaatatggcaggtggcttgtatgctgaaggcttgttctgagtgtccccataggctgaaagaactcgcgtgcactactaaactagggacatccacttccactgaaaatgggtaagatagaggggtataaacagtgtgtgtgtgtgtgtgtgtgtgtgtgtgtgtgtgtacatatggagattaaaggacaaccttaggtgtcaaccccaggtgccatcattgtcttttgtatttgttttgtttgagttagacagggtatctcactggcccggaagtcaccaagtaggctacgctaactggccagggagtcccagggttccttctgtcccctctccagcactggaattggacatactacagtgttcaatagtcagcctttaggagagaagaatgttaccataaaaagtaattagagtgatacatagtcactacaaaagcctagagtcaaacaaaaacaaacaaacaaagctgaaaacaaaaacaaaataaaaggattttttttggttttgtttttggcttggtttggttttggtttttcaagacattttttctgtataacagccctagttgtccagaacaactttatggaccaagttggcctcaaactctcagaaatccccctgcctctgcatccaagtgctgggattaaaggcctgcattaccacaccctacagatttgtttgtttgttttgagacagggtttctctgtgtagtcctggctgtcctggaactcactcagaaatctgcctgcctctgcctcccaagtgctggaattaaaggcatgcaccaccactgcctggctgattttttttaaaataaagatcacataccatcttatgactgtgacccagcaataaagaaagcctacttacatgcgggagaatctctttcacaattgttaccctcatgtgaataggcccatctattagagagcagagtatgttgttgattgctcttgtcccataataatcatctagatacttcctaaacagtcgctgatcatctttgtgattgaactagcattgcacggtatagataccacaattaagctggttctcttgtaggcctttagccgctgctgctggctcattgcaaaccctactgtgatgaccgcaacatcatctctatttgatgactactgtggttattagtgaccgcaaattcctaaaacaaatcgttggagactttgttgtggtcttcggccaggccatggtaatttacaatcaggccacagccagggagaaagcctctgcctcctgcctttgacctggaccgctgcctcttcaagcctaaatgaaaaaatagcgacagccaaggggccagggtctgcacacttcccccatgcttctgccagggtctgcatacttcctcatgatcccgccgtagccaaatggattcacggcttctcttctccatctattcacccattttgcagtgccttgtggtaaatgctaaagtatttctcagaaaattggaacgtgaatgtgcacaaacttggtatctacaatccctagaaactctagagattcccaaagaaccactctccggttgttcttcatctaaactgagctccggccaccagtgagttttaagagcgtctggctcaaccaatgctaaggagcagcagtgttaataacaaccaatccaagcagggcatggtagctcccatctatgatccctgcacttacaaagctgaggcagaattaccaggagttcaagaccgccctaggctacatagtgatatcctgtctcaaaacagcaaacaacacatacacacacacacacacacacacacacacacacacacaccccaccggcacgtatacacgtacacacgcacacacaaattcatgtgtatacaaagtcaccctccagttcttttagaaggagatggtcttgagtcccagacagaatctatatttgaccacaacccagggggcagagctggcacccaggaagagatttaggatatgtggttcatgcctctggtctccagggttccgggttcaaatcttagctctactgtttccctttgactgctagatttgtctttctcatctttaagctgggacaggatgagaagtgagtcaggagcctgtcactgatggcaaagctcaatgcctcattaaccccttccgtctcagtgtggattcctttctaatacttacctgtttccccagcacaggccatggcacccaaaggccacattgaacccttgaattcattgaggaatgaatcttcaaagcctggggctgaggggatcccagagaaaacccagcatcataagtcctatgatatgaatatctgtgtgctggaggctacttagtccttccttctggttgttggaggtggtgaggagctgaaagcagggcttacaacatagacaaattaggaagagagtgtgtttgcaggctggaaatgttgcaaagtgttagagagcttgtgcagcgtgaacaaaaccattggttcaatccccagcacagcataaaccacatggtggttgtactccatagaagttcaaggtccgctacacaatgagtctgagaccagcctgggctaaacaagatatttcctgaagagcaatccctgtttggtttgtcatgctgggaaattataactgttctacccactggaatggagataccaagatccagctgatgagtcaccatttcatcagtactctgtgcttctccaccctcctctgcttctccaccctcaatcacacaggcttgcagctgcttgcctctggctttctgtccagcccagagaagtacagtgacaagctggaggttaaggtgcaaattgaaaacagagccacatctacagggccttctggcttctaggttagtgctctgggacttagctgggacctggatactgataagtgtatggtgctttctatgcatttttattaaaatttgtcacacgctatgttttaatcacggtcccaccaactcctttcagactctcaactccatgtccactccaactttgtgtttttctctctcagtctctctttctccaaagaaaccaaaacaaaggaaaaatcaaaagaaaaagaaagccaacaagacgaaacaaaacaatctacaatctggcaccttgtgatgtggtcagcgccctctgcttctctacctccagcagagtttgttttgcattgaccagtcgctctgggcacaaggcccgccttggtgtggttggtatatccagtgacactccactgtagaaaacgggcttcccctttcccagcaggtatggagtgtgtaacttcctgatcaggagtgacactctgtgcttgcttccccttctcagtgctgggagtttgtctggtttgaatctctacaggttgtgtgtgtgctgccacgggccctgtgagttcatatgtgcatcggtcctgttgtgtccgggagacaccgcttgctggcactcatcggccatctctggctcttacaatctttctgcctcttcttctgagcctggagaggagggggtttgatgaatttctatggtttaaatacatactttggttacagaaatgtacgtgtttaatatttaccaactataaatacatatgacatctgtgcagtttatatttatcaactatggatatatgtaattatatgttatatgtagaaattatatgcatagtaagtgtctatatgagtctatgtttcatatataaattgtatgtatatataagcttctaaatattaagtgtccatgtgtgtgtctggcatttagatatgccgagtgtacatataagtacactatgaattagcgagtgtgtgtgtgtgtgtgtgtgtgtgtgtgtatgtaacacacctaagtcccaatagtcctatggtgggcgagagttgagtctcagcgtaacaggagcacccaggtctgctccatctccagtgtctaccctggtattcttctttataatgcaaccttcacagtctctggcatctttctgttctgttgtggtctgtgaaccagcaccacctggggactccatagaaaggcagagtctccaccccattgggaacccagtaagtcagaatctgcattctaatgacctcatggcggagcttattaactattattgttgtttctgattatgttgtcccagactaaaatctttcccatgataatcactataataggcagagcaacggtcttccaaaggcatccatatccaaccccggtcctgtatcgggcaatgtggcaaagaagaattaaggttacaggtgaagggacagcaccctggatgacctggctggaccgagttcatccacaaggtccttgagtggaggagagaggtggaagtaaagggaggctggagtggtgtgaggatgacttgagcagctgagtcacaagccaaggaaagaatgtggtcagcctgaaggaactggacacagcaaggacacagatgttcccctggaagcttccagaaaaatccgtctttcctcccttattacagcaagacctattggttctctaatgtccagctaagtctttgctgacctgagccctgagttcatggcgactgataaaagtagaactaggcagtgactacaataattagtcctatactccctctgtggacctactaagtgccactctagcctggtctctcagaccttttgttctaaatccttggggagtcccacctgatgttctgaaggcatgagatcagggtgaaaagagcaaagcacttagcattgggctggcctgtgggctgaacttgggctacctgctcttgttgaaggagtccttcatgcaactttgccacaggttagtcccaaccagggaacccgtgtgcccctcaagctcaccatgggcaggaggcagctatggccaggaggaggattgtaacagagactagccagagcctgtgttggcattctcttgctctttgtctgcccaggtaagtttctatacattcctgggtctcactttcccaatctgggaaacgaagaggtcagatcaggtgaattctgcatcaccagcagcaggaacactttagcatgtctgtgttcattttggcccaactttgtgacaaatgagggcatcaatgtgactgagcagggcccagcccagctgtctggacccaagcacgtcctctctcactgacagtccattcatgagcaaggctcaaatctgccgaacaactgtgtatatttggtaccaaacagagacttcggctgctctggtcaccgagttaaaatgccaaattactcattctcctgcagaaagcacaaggaaaaaggaatcatttctccctgcacagtttttccatgtgacaaattttctaattttacttcaggttaagccgactctagctcatggctccactccagagtctcctgacccctttcgtgattcaagtttcctgattaaaaaacacaattgattttgccggtttaatatttgcaaatgtgagctgctatcaaattcgcaaccgaacttcttcatcttctctactctgtgatgtccagcaatggcttcttggtccagttgttggggtctaggcctggccaactcctgttcactctgtgtgcacagacacttgtatctgcagagggaggggaaagctggcttagatggagcccatgtggctggatggtaaggagtgattactgggtatgtttctaggggcggttggttctattgagactgttgggatgggagctcatacctgctgtcagctgtgggtctacttagaggcaactggagcacttttagcataggaaagagactggtagctatgtttgactgacatgaattctgcctgtgtggcatctactgcatgtcatcactgtcttccacccccttgccacccttggggtcatgtctctctgacagtcagacgttgcctttctctgacctctggtttacttctgtgcaagcaaagaggcttgtccaaagctcatgccctatcgtgtcccttcttcaaatccctctatgctttccattacagccacgatctctacactgcctgggctgcagccaaccctctcctttcccatctctcctggcttctggctccagccctgctgaactccttgctggtctctgagatcacaggcaggctctttctcatccttacaagccttatgtttttcatagacttgctccttgaactgtgttggtccctgagccagctgcatgggcattaccctgagatagttagggatgcagggtcctttccccagatcaacagcatcaggctttgtgctttagatgcctctaggcaatgcatttgatgccaaagtgtgatccacagggcactgtggcctggagtgtgcaaatctggaagagttgatttggtttcaggctccacaagttaacagttggtgaccttggatggcttcttaatctctccaaacctcagtttctccatctgcaacaggagggataagactaggatgtatctcaggctacttgtgatcactaaaagcagcactgaccgtcccagctcagcacagtgtatatggtaaacactcaataaagggcaataagccttatagagtgggtgagagagggacagagacaagctgggaagtgtggtgttatcgtgtgtcagaagtgagggtcccttcttataattctctgaggatggggaagttttgcagcataagcctggtggtttctgattcctaggcaggatcagagaaggtggtggggagcaagatgagtggctaccaatacccttttgatgtaaagccacttctcaggggagagattgtggcacctgtaagtctggcagctagggactcacagtgcccatcccagagccctgttttaagaagaaatactgctgaaggcattgtggcctgagcagccgctggatgctaacatgacatccttataggtcacgggaccgaggcctaagctcagtgtcaccagtaagccctcgtgtggcttcattccacgttggtttactctgttaggggacagaattcatctgcaagttcttttcaccaaggaccttgagtgggccaggtcaacaccactcacctttggaggttagggttgttgagccttctgggacagggaaagcaacaactgtaattacatgtgggagagatgagtctgctaagcaatgatgggtggacagaaatagttgtgaagttctatggtagaaaaggctcatctatctgtggaagcctagtaggtttttcaaattcatgcctctgttccttcactttcacttaaacacttactgtacgcaaggcaatgtatgatgtgctgggtataaaatgatggacaggcaggcctggttccactgggggatgctaagaccaatgatttatccaaaacaatcctttggtgatgataaatggcaaacagggttctgaaggataggagccaggcatggtagtacatgcttttagcttagcactcaggagaagggggaggcaggcgggttactagttccaagccagcctgggctacaaggcaatacctggtttcatgaaaaactaaagtatagggtcctaacacacacacacacacacacacacacacacacacacacacacacacacactggatactttcatctgtatgagggcatcagggaagtctcccaaaagtgtgacctgtaagatgtggtccaaaggatgaatgaatttactcagggaagggtgctgggttgatagagctgaacctggtgggtagagaaccatattcaattcccaacaccacaactgtctgtaactctagacccagggaatccagtgccacttctagtggccatcacagataccaggcacccatgtggtgcacaggcatacatgtaggccaaacacccatatacataaaataagatttaaaaaatatttaaaaggaacagcctgccttgcccagagtgcatgaagaaaaagggacagaaggggtctctgggaggaaggtggatgcaccatcagtacctagcctaggtacctggcctaggtaccatgacccccaggtcccatatgatgctcacagcccagggattggcataggatggaggccttgagtcctggaggagtgtagagtgagactctgggtttgaggacctttcttgtttctcttcctctgcttatagaagaacatactgattccagtgaaggatctaggcatacattttttgcaacctatttttaataaaggttcaatctctcccctagaccagtacccagcagaggtagtagaagagaaaagttattagcatatgggggaagtggacttgttcagcaatagttcgttgggggcaagcttggtcctctttggcagcagttcagtcctgtagcaaacatcagatataactcagcagctgcagaccagttctctaggcaggcagacaccaggtatgaactggctgctacagtccagtccttgcagcaagcagacaccaggcagctctagttcagtcctgaagaaactgccaggctggccaaccaacctaaggcaaggccacagaagtgacaagttgcctcatgagcagttcttaggcaagtttctctcaatgtcaaagttatcacaagttgagctcaacaatgctatgtaaagtgaattaatacattcctgttgctagcaaagaataacgaaacagagcaaaccaaaccaaggctcagtgctcatctcccactgtctgtggggtcagatttatactccttcatcaagcatcttttcacgtgcctgctatatccaaacatcctttcacctgtgtctacttcaggaaaacagtctttcatgtgtttgctttagcaagacatcccctcacctgtgtgccccagcaaaatatcatttggcataaccgactttccaaagaaactagaagtttccacttcacagtactagattccatcctgctctttccctctctgtggagggtgttgttgagaatgtacatccagtgtgagtgagccttgggttcttcttgctgagacagaggaggaagctaggtcctggagagtgtctgggcaggaagactaagggagcaattcctccggacctgtcatgcctgtcccccatccatccctttagtggctcctctgactgctgtgcagaggttcctggctgggtaaccaaggcctgcaaagagccgcactgtttattccctggagcatgcactttattcagcagttgggaagtcggggcaggagaccagtcacaactggggagaaatccagagcatcactaagacaaacaaacacccgtgtgctatgacatgagaactgaagggctttgaagcacgaggctctcctggagtttctaagctcctatggcttgtgggctaagttgggcctacaggtgtggggtcctctctctcatgatgagcaacttgggtagaggtgggattttatgtagaactgaggttcctaaattatgggagagacacaagttgttgtccaaggtgccagagtgttatttgggcaaaattttactccttcacagcccatgtggattaggacaatgtactggatgacggtatgtagaccattgtgatccagagtcttgcaagagaattctcggttccaaaaggacttgtgtctgtcactgttgcacctccagcatctagaatggtgcctgccacacagcaggtgctccataaataatgcttgctgcatgagggagtgtgtgtgtgtgtgtgtgtgtgtgtgtgtgtgtgtgtgtgttgacggcttccagaagcttgccttctcagcccatgtttacctttccaggaataagtgagtggggctgctctcacatgggaagcttgggtggaatgtgaaaaatcctcttcatgaatatgcatgcgggaatccagccagtgctgccccaagcttaagatttcgaagaatcaccctttggaggcagcctcctacgcagtgtggtttacacccacacattgggtccttgtgggcgaaggcacagtttatcattcatgtacctcacccggctagccctcccttctcatgggtcctgcccatttctagcatctgggtgttggtgattgtctatatgggctttgccaaactgcaggtgggaaaaggtagagaccagccattgtcagcaatacaaggtttcagaacctagtctagaagcgtttgctgctgtctgggtaagtgaagccccacccctttcttgaagtttccaagaacacttgagcacaggtaagttgtctgtctgtcccctatcatggcatggctagcagcgagttctgcaggcattagatgaacttcagatcccagctcggtcacttattagtgctgtgaccagggcaccttactcaagtgtgggcttcacatctggacagaggagcaggagatatcctgatgcccagactacatgagatagtcagtggggatgctgagtctgaggagagcatctgcccagcatgggcgctcctgagaccttggtcctcactcttctgggtagcagtaggcctggaagcttcctgaaataccaaggcctggggcatcaccccaactccccttggggctgaggccaggcacctgtgttctgaagctcacagtgcattggctcccagacatgtgaggagctcaaggtggacgcctgtgctatgggaacaggatcacgtctgacctgttctctctgaatgtccaggaccagcagtggtaggccctttctaatcatgacattcaccttacactgcaatcctgagagcgaggtattgcatcatctcagtgtctggatagagacttaagctcagagaagttgaagaataaacgcaaggtccccagctaggaggcgattggtcaggatcttgctggcagatcactccggcatccacttcccatctcttactctctgtagcacactgtgggacgctggttatcctctggtccctgcaatgtgcctgtctctttattccatttcctggagcctctagcaccttgcagattccctcacagcttcttagaggccacaagtccttcctccggcaaacatttggagactgtcaagttgtcctttcatctgggttaaacaagagtcagtctgtttcaaaatatgactctggggtcaccatctgtcctggctgttcccttaaactcaaatcccaatgcagagacaggctctactccagcagctttgtgagggcagggtctctgcaggactgggccagaggatttctacaaagactttgtagtgtctttggtaacaactctggagcacgtttcttttaaaaatgtgcattgtttattgtcccctcaccaacagggctcaaatcattaaagaggaccccaagcccctggacaggttcagtgcactcgtctctccagcatgcatcttcttgctgtctaccatgtaccttgcatggcattttgccttctctcctttctctggagccacaggtgggtgtggcctgggtcatttggaatcatgccatcagcccgggccttgttttgctcatcttagggacctggtgtcttccaagatccttcctaaatttcaaggtgtccctgcctttctttttcttttttgctttagagagtataagtgccatctcaccctgcctgctacagctgggagctcattctgctatagcagcttgtctgccctggctggatccacaccagcgcatctgtggggacgccccagagccgttcccagggcagcttgatttgcccagggcgtacatgccaagttctgagagaatgcaggcaagtctgccactgccaaactcccacatgcactctgcattccaagtcccccagtcccgccctctcctcagcaagggaatggatgtgggggctgagtgtcagggcaatcgctggaggagaaggagatattcctcctaaaatggtcaggggagcttttctcagaaggcctttgaggtgccctgctgcctgtcatgtaaagttaagtctcccagatctgattctcgagtgcctctgctccaaggagagaagatgaatgggcttcatttcctttgccctcagcctccttacctgaggtagggaagccagcaggtcaaatgtgctcatgtgtttagtctgaaattgacctgcgggtggcctgatagttctgaccccgtagctcctggcagttctttgccaatctcttttgcaccctccccgaatcactcaaatcttagctttcctcacatggccttccttctggatgcttttcaatgattccccctctttcaggccacttcttagaacttttaggaggtcctgcaggcccccttctgtccttgactcatagtctccagactcaggacttttaggtcagctctatgtgtattggcaactaggctgagaatcaggtggagaccaactctcttattttctcgttgccttcgatgcttgcctaggccaagtcctggcagggttgcatgagggctgcttgttgtgggcagacacgggcaggatcgggataaagtgaatggtgagagtgcagctcttggctcctcctcagggctcccatctttcttgtggctctgttccaaagggtctgaggcctctggatggccactcagaagatgtttgctgactacttagtagcaactatgctatacccagaggttcaagggacctaggacatgtttcacttacagatggttacactcaagaaagcttcaaaatctcaaaactttctcagactcaccccatctctccacgacacacccacccaatgcctgtctctttcatgagctcgggctttatccatgcaagaggaccagggatctcagagttctgctcctggcgcctgtagggctggacagtctcatctgatcttgcccagttgtccagtaccacgatgggccatgagcaccctccccaacagaggcacagagaaggggaagcatctgttattcacaagtcccacccagaacattgttccaaggagagggaaggtggaggcggctggaatttcatctgaagtctgagaagccagtgtgtctcaggggcactcccagcccagctggatgagagccctgggcagccatcttgcagaaggctacatttcccaagccttcctgcttaagggtcaagtgagagtgtgggactgcagacctttactgtattatgtctggacagcaggggtcagatgagggtggggttaaaaagtacatgttaactaaatgttggtattggtgaacaaagattggcttttataagagttctttttttaaattttgttgattgatttattgattgaggtttttaatggatattttgtttttagaatgtaatacatgtactcacgaaatgtgatcatatctactcccaatattctccctttctcatcctcatgcccactaatatacctcctctcatttttataactttttaaaataacacaccaggttcaattagtacttctcctacaggcatgggtgcaaaaccatccactatatttttggaaacctaccagtgatgtctctaaaatctcaccaaacaccttctgctaatggctccttaatttgagtttgggcctagagatcacattcctcatacaccagaattttggctggtttgatctatatgggtcttgtataggcaactaccaataatggaggttgatttccttatccatggccacaaagcaatatttcacaactcttgtctacatcctccaactcccatattcttctgcctcttccaaaatgatcccagtgcctatactagttctttctgatcaatgattaataaatatacagtgctaaggtgggcatacagttattcttgtccagaattcactaagttggttcacttatgcattatttgtttattcatttgttcattcattcattcattcattcattcatgtattcatccaccaactgtttgacctttgccaagtctcaggcaagactgtgtccagaagctgtagggggagtctggaggctttagagaaaagacaggagatttcagctatcccctgcagcacctgcaggtcagtgagggacaaggacaagtgaacagatggtgacagagtagtgaaaaactggggcttctgggagaccaggcagggggagagagctgctcctgagatatagcgtgatacatctgtggatgagcagaaggggttccaatagggagctgcaggcctacttcctgttgaagctggagtggcttcccctggatgtctgtccatctctaactatatgtgggacaagacagattgggatgaagctgtggaaccaggtgcttctagactgcacagtccttccatagagcaacacagactcctcgtggctggccacataacccttgcccaacagcgcctggatctgccaagctccttctctacccacctacttccagggacatccctacataagcttcgcgccagtcaccctccttctcatcagtggagagcatgtggcagcctccccctggccctgggacaaactgcttcctatctgtaaaatctggtgattcacacagtcgacctggctgggaagccactcagctgctatgttcctaagttacagggaaggttcagctttcccagaaagttctggggcacttcctctatagctctctcttaggagaagccgctggattcttacccctgtactctgactctgggtttccggccatgcataagactcctgcactgcctcctgtccaagactagatgtaggccaccatgctagcctcagccacagagcaagcttcaaatttgagtgtgagccatagacccttccaggattggtaaatgcatggcattcagggctccacccccaaatcggtggtgttttgtgtagatcctgagattcagtaagttcccagatgctaccagtccaggtgacacacttggagagcctcgagcgtcctaggaaagcagatgggctatggagtctgaatccaggccataaaggtccagactcttccttgggtggctggatccttccgtgcctccatctctgtgtctgaagagcagggttcactgtaatagctcttcgctaggttcttgtgagcgttgcctgtggaatggtgctggtgcgcatcaggacatctatgaggtacccagagagctgttagaacaaacaccacaaaagtaagcgaaaacatcaatcatttatcatcgtgcagttgtggaggccaggaatctgaaatggagaagtccagagcccttctcctctgagctattttccccctggagtccccaagctgagccctccagaggagcctgtggggtggaatggtgactcattacagctgatgtcatcttcaggagtcaaggccctgctcacactcaaagagcctttgttccccaagtggaaagcaaagtcctcgcactcagagaattgactgcaaacttttccctcgtgcccttggcatctctggtccacttgccacttgtcccacagcctctgggggtgacatcacacgcaggttccgaatcaggtgtgggaaggcaggtgaaaagagggatcaaagactcacactgcagagccctcggctcactcgatggggcacagatatcttgtggggaggctgctctctctctctctctctctctctctctctctctctctctctctctctgtgtgtgtgtgtgtgtgtgtgtgtgtgtgtgtgtgtacaaatgtacatgctaagtgaactgagtcccagaagaggaatttggccgtgttctgcaagcttgctttctgcagattatttctttctggctctattcatccaatcacattctttccttcctgtctcagagatgtaagatgcttgtgaggctaatctgggacatggtatgttgagttgggggggggcagaggtcaacaagaaatcaacttatctaggcctctgactataacccaagtgatccatgtatgccaggccccgtgtttatcctgatgttcactgagtgacggatctcatattctcagccagggtccatcatgtccacacaatacacactggaaggcctcagctcagagaggccaagtggctagcccttagccacccgagtggttagtggcagacacaggacccagtgtatatctagctgatgttgaaactggctcttgcctgtggctgttaccttcgacagggcatcacacccacccaggccaaagcctagagaattctacttccttgagaccaatcgggaggggaacaaccatcagcccttgtcaccctgccatttatatcctggttgccagatgtgaagcgagactgacagttctttccactaggtagagaatcaagcatgaggaggagctggactggcaaactgttgagttctgggcacagcacaagcccatagcaaaaggccatggatagtattgactcctgtcactcagttcattcccagatcacttttgttaaggctttgctggggactgagaggtaagctagagtggtccacctggaagcccacgaaaagatgcagcaagtgcataggaagagggtggctccacggaaggacagtgaggtgctggagcatagaaggtgcttccatgggaaacgccatgagaacagtggaggcagcgggatgcggcgggcgggcagagccctcttcctgtctcatgtctgatcctggactgagtgagctgttcccttgctctctaggaatctctcgtgagaagtgagagagtctgagagggacaggtggggggatgactgggaggctgaagaggttaccactgggcaggtctacttgccagtttaagaccagagaaataaactgtagccctaaaccccagatcctagacccttactaaccaacctctctagaatagaaagggggagggaagatggagggtctagagcagaggagagagggaaggagagaaaaggagagagacagagagagagagagagagagagagagagagagagagagagaaagacttgcttgagggagtgctcacacagtaacttcattgagaaggaaaattcttttgctatatatgaaaaccggaaaaaggaagaggcgttctcagtttacttggagaaaaatgctcttctgtaattcagaaaaatggggtctttgatcaccgcccggccaggtctcctttctaagtgggcccaggacttttccctggcaggaaaacattcttctaagaagtgctttgggaggtaggtttgtctaagaacctcttgcaccgtgctgtgttcatgtccctcacgtagggagtcaggtagtcccagggtctcttgaggctggagggtccttgcagtttccttccagggtggggctggctttctttacaggcagagtgtgatgacattatcgagggcgccgctgcttcccagttctagcgaggccaggaagtctgtgggagaactgttctcctggcccctgcaggagtcatttcttccaggcctgaaggaatcgctgcctagggtggttagaaaaactgggaggcagacgaggaggatgagggattggaggcactccgacctggcaggggccttgggaaaacatttaggccagactctagttcgcagatattgagccagagacttggaagaagcaaagagacttctgaagccatgtgtggagttggtgattggaggctgtcttaaaggctagtgccatttctagtacccttgtgacatctgagagaccaccgtatggaagttgacatttttgtctacccaggggccagagctctgccagctggcagggtggggcagccacagggaggataggcttagctcagcctgagcaaaacccttgaagacttattattttcttagggctgttgactaggagtgagctctccagcagtggaggtgagcaagaagaaagcaggtggcctttgatgggtgtggactgggggatattgtccacagaaagagagatttctttttcagaagtctgcagctggttaaactcctcatgccttttctttccagacagtgagagccagagaaacgacgggtgtggggtgtgccttagtccttggggccagttttctgcataaatgttcaaggaaaaaaaaatcttagatggacctgttaccagaggcctgtatgtggtttcagctatggggaggctgaggccagcttgggcaatttagtgaaaccatgtcttgagataaaaagtaaaaaaggctaagggtaggcccagcaatgcagattttccctagcatctgtgaagaatggagaatcaaaattcagaactgacaacaaactatattaataatcctaagaaggatgggcattgctgttcccagtaagataactgggaagtgacaagggtgatataggggtcctccttcagccttagagcgatagttgaggtaaacacagggaattctggactggaggagccatgatagggttctaaagacagtcactcccaccttaccctgaacggccccttgattgcttgctggctgtagcccaggctacaaccaccatggagcgtccttgaccagagggactacacacaccatagatgaagagcagctaagtgttctgtcagctttctaggcatgaatgggaagctctgccaaacagagaagaatatctttgcctccccaggcaatccacgttggaaaacaggatgagagctcttcctctgggttctaggctcagcgtggtcacagagtactgcataatgtcatgcctctgcttccggggcctctgcttccggggcctctgcttccggggccgctttcagatctctgtggttgggatctgggttcctcatggttcctccaagccaagagcactcagtattcctcggaccccggtctgtaagttctgagaagacgcgggtccccgcgtggccgctaggggccgctgccgagcccagtggtggagcgttcctggctgtgcagcaaggctcttgggacttctccatatcccagccttgacctggtgccagaggaaagcaactaagtctcttgaggcttcaaatgctgacaagcaagagccctgggctcaggtcccagatggtcatctgtgggatagagctttgcaaagccagatacggttccctagggacatcaggctccaaaggccagacaggagaccccacagatggaaaggctgatccaacccagtgcacagaaagggaaactgaggctggagtgcaaaaggagatataggtgtccaggggtctgtggcacagaggagggatcttgtttcttgcctcctccaaatgctgaacctaccagtccagtttgtttcttcactgttaggattctttcctggtttccatggaaactggcatccggacccttgggaagagagtggcaccctgtggggactgctcagattttcctctgcagtgttctctaaagccttctgatgatttctccctatgccctagggaggggccaccctgaaatcactgaggattctgcaccgaactttccaagggcaagaggcccaggctgtttctgtctgtcttcctttcctcaggccacgttgcagactaccagctctgccaaaccctgtgattgtacagggagggatgcctgtaggatgaaagtggaattccttgtgttggggtacaattgaccgagcctggaaatactggtgagaagatgcaaaagatagtattagggttctggagagatagatagctctgtgcttaagagcacccactctctggcagagcacctgggctcacctccctgcagccacacagtgccttgtagccatttcttgttccagttccaggggatcagacattctcttctgacctccgcagagattgcatgttcatggtgcagggacataaatgcaggcaaaacactcatgcatataaaaaactttaaaaaataatagtgacttagaaaacagcatgagaacagaagaaagaagagaagaaggagggaaggaaagaggggagggtaagaagatgataatttctgtgtccctcacactccactgaagatagatccagaaactcataaatgctaggctctacccctgaccccagatgtgcccagaatggaattttgactctgtgttgaaggaaccagggagctattgaaagcgttggttgaaaagcgttggttgaaagcgttggagctcgcaaatagcatgaacagataaccgctaaccgttcctagataatgagcttctggtctgggttcagctccctccacatcttcagcactatacgaggcacagcatggggacagattttatttgagcaatgcccaaccccccacatcccccatgaaactcctatgcattaaagaaataaaggagcaagactgaagttaaagtcaagcccatgaggtgtttgagggtcagcagctatacacagacagctcatcttgtttaatccggtgcaaattggggttctgagacagggaggggttagctcatgagcagcacagctgagaacttgagtgaacttgagccccacctcttctgcctgggggttcactgcttgccctgaggctgtgtggcttctgaagaggctccctgggatggaaggagcttgcacatctagttgatggatgagcacgcaggtggttgtagggtgaggctggaggctggaggctggccctacctatgctcattagaacttcagactcagagcctggatgttggtttagccagcaatcccatcttagccaaatcagagagccccaggccagggggaaacccagtctcagtggctcctgaggagtgaaaggttggcccctagcttctgcatatgcattcattcaaatgtacacacacacacacacacacacacacacacacacacacacacacacacacacgcacggacaaggatgggatccattcatgccagtttgacctccaatttaaggactacatggaaaaataacaaggtaattataataatgagagaagtgtatgctgaatgttctagacacacagttttgttcaaattgccctatgataaatgttaaaatctgtggagaagtgtgagccatttcaatgaccccaggccagagagtcccattagcagcccccaccagcagagttcccagccttccaggctttgtcgctccgagatggagagatttcttcccaccagctgtgacctccttctctcccttgcccccagcacaaagccatcccaggacaagtcatggaccaaattgccgagcctgtttctcttggctcccaggctcctccttcccgcccctcgtggctgcctgagcaggtggcctttccgctggaagccagggataaatgagccagcaggcacaggcccagccctgagtgtgggtcactccaggccaggggtcgttccccgccataccgcgcccgccgtgggaccatgcctgtggaggaaggcggggctgctgagagcaaggctgaggactaaggcttgtaacagactctgtggctctctttctgagtcgatggaaacggagcctgtggcccagcttctgcacacttgtcctctcttgctagtctgggatcttcggatgaaggtgggagcagagagggtgtgtggagagagtctgcagactacagcttttgctaagtttatgccttgcaagctgcacagcttgctgataacttggacaccatgtcgccatcccataggatctccgtaagggaagtgggcaggaaggccccatgtcaacctggtcatctactcaaaggctgcatgtttggtagagggtagaggctagaggggaacccagctctgaccaaagttaaaggagtcctccactgcagcctgcttcctcttcatctcccctttgccagccggcatactatgggccagtgtctagaaaggctgggtagccagggatcttgggggatttatgatttggggtctgggtaaccccagattctgctgctatgcctcatgaccatgtctcttcctcctctccatcagttccctggcccataaagcaaggaggttgattgataggattatggaaaaacactttaaacagatccctggaaataggaattcatgagatggccatgtgcaagcctaggtgagcccttatctgatccctgaactctatgcagaaatagagccctggatgtgagccagcccacttaccctaatggacccacaacttctgcagacgctgaagggtcccaccagagagcttcccctcctaccagtaaaagagaggggaggggatgaggggacaagacaaagaaggggtcacatacttggggcttggtgttttatctagagctgtgacagggagcggggaaacctgagtaggtctttcttccttcttcatttctttcttacaaagatggcttcaccccaatgaaaaagcatgttgttaaatttccttcctttctctctctttaagatagggtctctctacgtaatcctgactatcctggaacccattatgtagaccagactggcctcaagactcatagaaatccacctgcctctgtctcctgaatgctgagattaaagatacatgccctatgtctggcacaagcccttaaatttctaaaaacagattcaaggatttaagaatatataaatatctttatttttcacaccaggtgactggtataatgtaaaggtacccagtgaagaggcgagtcatctatcctccattctctacttcctatctggacatgatttctagccccagtttcttggaaatccttctggagagatcctaatatattctactatataaattgattatgcatgtgggaacttgacagatatacttgaattaagagctttgaagcctctagacagcaccatctcttgggctaccttacacatgtagctcattgaggctaagagccgtatgtagagcatgactatggccttcagcgtcctttgcatgcttatgtatttgctacatgctgcttcctgctgataattattcttttctttttactgactgtatcctggctactgctcagatcattacctaaggactcacagcattcgggaggctacatccaattcccttgagtgaatatattttatcattcacactgggtcaaagaatacatatgcattggtacttttggaaggtgtcagattgcatcccatggatgtgacacaatttaggatttcactagcagagcaggagatgggcccatgctgcctcagcctcttgccagcattttcgattagccaacattctgatcgctgccaatctgataaggaaaatggattggccttgcagctctgctcttctttcattgtgaggtcaaacattttccatatacttacatctgagccgccttcgttttttcctgctgtctatagaacttcctagtcttcacccatcgatctgctgacttatggcattgcccatctgctttgcctgttaaaggagtggcattgtgacgtctggtttctgctttttctgttggctcttggtttttaagctgacattgtgaggtttaatattattatgatttttaaaaaatgttttggtcctcagatctttatttctttgtaggcaaatttaaccagatttatgtctttaaattatgaaatcactattgtgagcctttgctttgtctagttacatttaaccagatttattgttcttttaacctatgccttgtggggcttgagcctcaaactaaaattacttcaaatggatgtcttgtcgtgctgttttaaagcaggctataaactggagaggatagtattcagttgagaattaagtctgggttcatgactgttggacactttccctctattaaccttggctttgtgctctgtaaaatgtggaggtcggaagtttccatcctcccttccatccatccatccagccagccagccttctgttgactccttactttgtccatttttacactcatcctcactggcctaggtcctgggaaccatgaacggtaaaatccttgtcctcattattcactgggagtagaaacaaacagtcaatggtgacatgaggaaggggctgtgatagaagaccccagtgtggatgcaggaggcttgcagtgcagctccaccaagaagagcttatgggcagtgaaggggaaatggttgcaggggaggagtcctggactgagtctcgaggaggaagaggaacagggggagaaggaggagttattctgaaaggtgattgggtggatggggtgagtgtcatagggaaagcattggggtagatgtaggtctgtaacaacagaggggcactcaggggccgttgtagattatcttaggagggcaggggagaatggctgggcacagacagaaaaggcctctcaagtccctgggtggctgcctgaccctggagaccacagatggccatagaagatttctaagcaaggactctatgtgacccaattttctctttaggtaaagagggtggtcgtcttcataaaagttgtgaagtgtctccagtgaagtgtgtcctaacgaatccttgtggtcaccgtgaccacattattaatcctgtcactggggagcagaggcaggcagatctctgaaaactttggggatagcctggtctagagtgaatcactgggccagccagggatacctagtgagaccctctttacaataacaataataatagcaacaacaatacagtgaatacttccttggaaccaatgttaaaaattaaacatagtgaagctggagagacggctcagaggttgagaaggccatatagtgctcttccagaagaccggaattagattctcagttcccacctcaggcagctcacatgacctgtaactccagctccagggtgctgtgacacctctggccttatgcatccacatccacacacataattagaataataatcaaaataaacatttcaaaaacttgaacataccgctgtaattaaaatggacctcttgcaagtgagtctctgcctcctctcagcctgggcatccgaggccacccgtgggtgtggtcagtggaacagaatctccaaagggcacttgagcagcagccaatgaaactgtaagtaaacagacccttgtcacccacaaatccctgtcatctgtacagtgggatggcctgtacccataagcagaggaggcgaggatgaaggaatctgtagcaaattggtctggaaagtcacataagcctccctttccatcaccagaaaagcgaccttgtccattgcagctcatgcacctgtggtaggaggggggcccagcttcaacaaggattaatcagaaaatgatgatgttggggggagagaggaaaaagaagcagggacggacgaaggcagcctgccagtgtttgtgtgagggttggagtcatctgtggtggccctgcactctgttaaagacaaggcttgcatagtaaatgcaaacagaggcacgggagggaatggtgacatggagtccccagggcctgggctgaggaagtggactggagagggtcagcaaagctgtcggtggctcttaagaggagtgcagggcacgtgctgtttctgcctgctatcctttagtttctaatttttcacactgggactagaatggagagcagatcttgagggccttgtgcctgttggacaagtgtggatccagggagttttaatcccttctcctttcttctctctctcttgcctctcctttggttttttgagacagggtgtctctgtgtagccctggctatcctggaactttctctgtagaccaggctagcctcaaactcagagatacatctgcctctgccttctgagttctggcactaaaggtgtgggtcaccaggcatagccacccaatcctttcttctgtttagttttgaaacctggccttattacccaggatgggtttgaactcacaacatatccacagcagacatcaaacttgccatcttccacctcagtctcctgtgtaactggaattataggcctgcatcaccagactcagctaaaaaaatttgaaatgaaataacatttaaccctcaaacttccaaattatcatttgaaatcataaccaatatgagaatcgttaattagctatgttacactgttttttccccccaaattgagtctttgatatccagtttgcctttagcacagcatgtttcaaagggaagacctgcgatccaagtgttcaatggctacttttagctagtggttcccatgccagaaaaggaggagttagcaacacagcttaggtggagcttgtatcctttccaaacctgaaagtccatgacagtgatgggaagggcagaggtgaagggtcaccaccacttactgctctccagccctgtgccagcatctcacactgtgtcgtttcatcacctcagctatcctgcgtgatgacatgtgtttttctttttaaaagttcacttgtgtatatgaacacatggacatatgcggtaagtgtctgtgtatgtgtgtgtgtgtgtgtgtgtgagagagagagagagagagagagagagagagacagacagagacagagacagagacagagacagagacagagacagagacagagacagaggggggaaaggggggaaaggggagagagagagagagagagacagagacagagagagagacagagagagagacagagagacagagacagagacagagaaagagacagagacagaggggggaaaggggggaaaggggagagagagagagacagagacagagagagagacagagagagacagagagacagagacagagacagagaaagagacagagacagaggggggaaaggggggaaaggggagagagagagagagagagagagactcagaggccagaagtcaaggttgagtggcttccttcttctctcactgaatctggagctcacagattcagtctgtctggaccggctggccagctggtggcaagctctaagcactctcttgcctctgcttgccttgcactgggagcaccattacagccatgtttttatgtggaggctgagatccaagttcaggtcctcagattttcatggtaaacactactgactgagccaactcctcagctcgtgtgtcccccactgtgattaaatatacatagcatttgtcattctgacctttggatgagtctccatattactctttatattcttctatataaccaaaatatgttatggcttaaccacacacacgcacacacacacagagacatacgcacacacatacgtagacatatacacacagatacaaatacacacagacacacacagaggcgcacatactgtcaggcacacatgtctagctgctgactatgtgactgtggcccttacctcggggtcctgttggtgttcgggatctgccttcagcttagtttcatccaggactcttgtggcaaccccccttctcatcaaactccgatatcaagtcaactggaagtcaggctagctgtggttcacagatctccccgtcactgactgtgtatcctcaggccaggatttcacgccctaagcctcagttcttcatccataaaatgggttaggagcagttgatttccagggctgatgcaaggacgaaggaatacaaaagatgaaaaaacagcagtgaccgctctgcacaaggagttcaaggatccagtccagggaagtcttgactattgtgtagatgtaacagaaaggattgttgtgtctactgtttttgactggaggctacatggatggtactctactttactctcctgttgtgacaaaaagcaacttgagggggacagggtttatttcaccttactcttccaaaacactatttagcactgacggaagttggaacagaaactcaaggcaggagcttgaagcagaaaccacagaggaacactgctaaatgctccctaacctccgctcagctagctttcttacatagtctaggaccccctgccttgagttgacaaaccccacagtgaattgctgccctctacacaaattggccatcaagaaactgttcccccagagtgcagttatagagaatgcttcaattgagactccctcagataattctgggctgtgtcaagttgacagttgacgctaactagggaagacagtcttgatcattcatgtgggttttcctttggcttcctcatgagatagagagagaatcctagccatggactaggggcctctgactgttagctatagtccagctggccactaggatatccgcccttctatctgtctgccactgctccattctgaggctcattgttctaggatctgactctggccctgaagccatgccctctggctcagtggcactgggtgtgtccactctacctgagtcctgcattcctctctcgctcagttctgtcacttccgaggcagctcagggaagtgtgtcggtcactggagcagcttgtagcttttgttcatggacagcagtggtctgtcaaccccgccaagcttgctcgtgaagagcacagactcgagtcaggggagatctcgttttgaattttgcatgttgaatcttgcttgcaaatttgctagcttctagcagccgtggttttctcaggagtaaacggaaataacagtacctaaccttgtggagctccagtgaggatgaagtaggtttaattacgtgagcagtgcctggtacagagagagagctgggatgcagatgctgctgctgctgctgctgctgctgtgcctgatgatgatggtgatgacgatgatgatgatgatgagtgtttaccactatgaagcaaagctcaattgtgctggactccagggaacacccccccccactttgtgcctgctttacccctatgctctgaggcacttaaacagaagacctcattgtttgtattgtttgtaaaacaaagcaatccagcccgattccacttggttaagtaatctccattaacttggagatttctggaaacatactctagaaacgatttgtgtttttccaaactgtagatcacctcgcattagtgggcagtacgatcaattaatgagccttcccagcatggttttaatttttagaagagaaaaacaacaattaaaggggaggagaaagcagtggaaggcccggtgagctttcacagtcaccacgcagtgctttctaaaatggtgtttctgagttacagccatgtgtttttgtgcccagtgtacaccacacaacagcactggggcttgcttcaaaagtttgagaaactgccattcagaaagtctcctttgagtggattcccatggcgcccacctccttgttccagcatagtggactcacagcctctctccctctctccctccctgcagggtcagcctctcaggttcacctggacctcacagtgctcattggtgtcccattaccctcgtctgtgtcctttaccaccggctatggcggtttcccggcttacagctttgggcctggtgccaacgttggccgcccagccaggaccctcatcccaccgaccttcttcagggatttcgccattggtgtggcggtgaagcccaatagcgcccaagggggcgtgctcttcgctattaccgatgctttccagaaagtcatctacctgggcctgcggctttcaagtgtggaggatgggcgccagcgggttatcctctactacacggaaccaggctcccacgtgtcccgtgaagctgcggttttctccgtgcccgtgatgaccaacaggtggaatcgttttgctgtgaccgtccagggcgaagaagttgctcttttcatggactgtgaggaacagagccaagtccgtttccagcgatcgtcctggcctttgacctttgagcccagtgccgggatctttgtgggcaatgctggagctatggggctggagagatttacggtgagtttcagtccactccccacagaccagggaagtttggacacgaactcccacacactaaggaggagcaatgatcattattattttactctcatgctctcaaaaggcacgcacaccatgtgggaaggactctaggcctggaagccagtgatcccagtactctgcaataaactagggctgcagtgttaggcagtagtgtatgcccgggtctgttgtgctggctgaatgtggacacaaaagcccctatccggaggctgcgctttttggcccatcctgtaatctcagcactcaggagagtgaagcaggaggatcacaaattcgaggctggcctgggctacctagtaaattataggcctgtctgggaaaatagtccgaactgctttattcactgaaagccatgactgaaagagtcaagcctgctagtctcaagtgacttaatttccacatgtggatggtagttgtgtttgtttctgtaatgctggacaaatctgaacaatcgcattgaggaatcacttctctgtcctcttttaaacagtatgtcctaaaactaacaaaccgaagactgacttgacttaccaaggtgcattctggagaaaatatccattatcagaggccctcgggtgactcagatatactagggaaggcaagaggcctggctcagacctgcaatttcagcactcacgtttctgagagtcatgagttctaagccagcctgagctacagggtgagtgccaggttagcctacagactgagagatcccacctcaaaatcttagcaatccagaatcaggcagatctccgtgagttcaaggccaatgtggtccacttagtgagtttcaggacagccagagctacaaaatgagaacatgtctccaaaaataaaattttttaaaaattaaaaaatagaattaaagaaagaaagaaagaaagaaagaaagaaaggaaaagaaagaaagaaagaaagaaagaaagaaagaaagaaagaaaggaagaaaggaaggaaggaagaaaaagaaactcaaccccgacaaccaaccaaccaaaaggaaatgaagaagtcaccactagagggcagaaattgaatctatttgtagctcagtggggacgctgaggctgtgtgtacatgctacacgtgtgtgcgctacacatgtgcgcatgctgccgtcggtgtcttttgaagagtgagctccagatctggggagtggggttgggaggccactggccgctcaccacatcacaacaaagtctagcaaggaagttttgatctttgggggcagagggagacatgtttcagggcctgctgctgaccctcagaggccctggagatgctaggaagctgttgtggctgtccatattctgagcatatgctaagggggtccatattctttgagagcaaacaaggagagtcccttgcctggagagctggaggggagggttgcagcagtcctggcacctccgtagacagcacagtcccaggctggttctttgcaatgtcctcgctcgccgggacactcctgtcctccgtgggcattaccatgtacacctgtaacccatgactctggtttctctcttcctcagggttccatacaacagcttaccatctattcagaccccaggacccctgaggagctgtgtgaagcacaagagtcctcggtgagtctctgcgttctccccccgccccacccccatctcacccagggctctgtgcctccatcccccagtcagccaggggaaggctggatgcccatgcaattcttctccctcagcgtcatgccgccgccgtctaaagcctctcatcatggccagcactgccccaagtcctattttgggcttttggctttctttcactttttaaagctcttcagccatctccttggagtgggggctgtgtgtcttataaggtgttcctcgggctgtggcagtcaatggcctggtttccagccttcctgccaagaagggtgtcaggattctaaaatcagagctaaaatgctaagatattctgggtgtaaagtcctataaaaatgaacctaaatttaggttcattttatgcttggcaagtgaatcgattcctaagctgggggtggggtgggggccagggaggaaagatgtctccttccttccttccttccctccaggatttactggtagtgacagccccttgtaggctggggataaagggctatacttcaggggccgtcccctcctccaacctatgacttagagacacaactcagtggagagagtcttagacctagctcagcaggtcagggaacagaggggcaggaggaggagctggaagccagggagggagaggccctgtctgagggttcttccaggcagacaggagcatcatgccaaagccagatgcaggccgggtggcgaatcctgtgactgttgctctttaagtgatgtcagcttctgaacacattagaagttggtttcactaatttagtgtttaaaaaaaaattctgcacaccagaggtagcatttatgcctgtttgaatttctagactcctgagccagtgccattcaagagagctgggagataggatgaggaagttgtcaaatatttgtctctgctctgcattcaagttgaagtataaataacccagaggtcccagaacagaggaacctctgcagacaaagcactggctcctgggcagacacaggggctggctgtgaaggttaggtgacagcaggaagacaccttggatgagtgctccctgaatgggttccagggagcatcttgcacaaaccaggagcaaagggagcctgcacatggtcagaaggtgaagtaacgaattgtagcaatagcagtgtggatggaaatagaaaaaccaacaacgcactctgcctttcccaccgtgtctctgatctcatgtttgcatacatgtatacacacagaaaggcacaaacaccacacatacatgtattcacatgtacattcgtgtatgcatgcataccacacaaacatgtatatatgtgtacacatgtcttcatacacatatatgtatgtggatgtatatgtgcacacacacatgcatgcataccacacacagatgcacctccacagatgcagtcaaacagatgcacatatatgcatgtaagtgcacatatacacatacatgcaaatgtacacacatgcacatacagctcctctgcaggagtctgcttgtcagtctctgaccttctcaagtaccataatccagtgtaacctgctctcatgcctcatgtgtgttgtgacttatctcctcacaggcgtctggagaagccagtgggtttcaggagatggatgaagtcgctgaaatcatggaagctgtcacctacacacaagccccggtgagcatgcatgctgcccccatgagtgagttgtgtgtctcaggctgttgtcagatcggtgaggttaagtacctctgggggagtcaggagggccctttgctacctcacacccacacccaagcaagctgccaatgtcccagggtcacctgcatgcatgactatgaaagacatgccaaggcaaatgagctttgtggccttggagaattgactcaaacccactgaacttcaattctcttctaccgagtgatgatagcgtatagggtcattggagaggtagacaaggcagtcaggagagagcctcagaaagtccccggcatgagggaaataaccctgaatgatactgagtgttgtgttgaacccatggcaaagcagcccccacctcatcccagcatccacatttctccctcctgggactgagttctgcagagaagagaaaggggtttccaaagccttgagtcagaccatggagttgcaaggatctcccatcttttgataatagcaaggagcgtctgagctgcaagcaaagacagctcccaggctgggcgcagcactcagtgaaagcttctgatagagagcagggaaacagaagtaaggcagggactgtacagtatagacctcaggcagcagggatgtgggtgtggcaggtaagaaccatagtctgctaacgctagaaagacttagacagatgtctataccagaaagggaacctgggcaaactgagagcacaggtctcctgatatctacccaaccaagggtggtctgggtgggattgtggcactgcacccccaagaccttggccaatcttggctgagatggggaagctgaggatccaggagtctgtgcactgcttgggggcagtattggagtcctgtgtgtccattaggcttagccacccatgggcacatcctggcacaggtcagtgggccacatgctcagggctcaaagcatgacgttgctttgtatagacaagttcataacctagagagaggctaactcagaatactaacaacctggcggttcctagagtgaccagaaagtgcagtagggtctgagaggtgagagggtcacaggggtgagaatggggcacggatttgggaggggaacgtggagacagccatcttaggacaagcatagagggcgaccaggagaggaagagagctcacggttctgtggatacgatgtcttccttgcaccctgcatggaaggtgatccaccatgacaccagtgcttcagatatagggactgatgtggggagcaggggacagcagcaacctggaaagggtgtgacattgatctctgaagacctggagaagtgatggaaagagaaatggctagtggcgtggtgcacttgggtctctgaggcagcccgttcttttctttctccagttcttagaaacttgggagaagggctgtactcagagacctacccacagtaggtcctagccctgttgttcctggctactggccttcagcaggagacctaatgtctctaagatagcttcccccattagtccagagcatgcctgctccgtggattggtctgagaggtggacaaaccacatggtccaaacactcaagtagacctcgatacacagcagtggtgggtaaaggcttgtggtggtcactgcaaactagctggtgaagatttcaagaagccaaggagctcagggccagactcaatgcagttggttccctgttcttttggaatcccctccacactggcttgctggtgtcttgttgtgcaaaccctctatggctgtcctctgcttaagagaactcccctagacccaccctgttggtcccaaagctgctggttcccaacacccacatggcagacaccatcctcaggattcttctgtccctctacattcgttcctccacctacacatgctcaccctccagagggcgctgctgagttcagattcatgtcagagagggcttctgtggtctgttctataggagagggcgtggaacagcagtgttgttgaggccacatggcctgaaggtgacagagccacatcttgggccacaccctcactctaccttaaagggcatcgtggctcttttttggcacagggaatttccctcttggtctcagacagcccttcctttctctgtctggcttctttcttggtcagaatctcacttctccatttcagcctttgtagcttgctaccctccgggacatggactctaactgacaaacagagccagagacagcctgtccagccctccctgctcgtcctgtttagggtcggcacctctgctgccccatgcctttctctcctgccgagccagctcctgttcatgtgcctttgcatatctgaaaaaaaaaaaagtaccttctgctgagttagaattaacttctgtttctcagctctggctgtacacatgaatcacctgtacccaaatgtgtgtggaaccgacagagatctttactaaagaagccccagggctgcttccctggggtgttcagcgtgtctgagcaaagcaagaatctacactggcagagagctctgagggtgattcccagacacagccaggacctcttccagccacacctaagggctctcggcttcccagacataccatctgggacttccaattccgacagctctgtgcagttctgcttgcctggaacccccactccacccgcccttccttccttccttctggcaaattcttatccacctcaggatccaggccaaatcctctcccatgaggccacttgcttccatgcccctgtttccagcttggctcttgcttctgctgtcctgtgtgctctgtgataacagcctgtgaggctgttctgtgccccagggctcagcccacagccgggcacatagtggatccacaggaacctacctgtgagtgagcacatccgattgtgactgtgagggtgggcaaaagcaaagcaaagccacacaaacacacctccacaataacttgaaaaggcacggaagtcttcagactagatctgcctacactgtcacagcccacacttggttcctcgcccgtattccttctgcagccaagagccgtgtgtttgagatgaggcacctcactttctccacagagtgggatgcctggaatctcacctttccccaaagcagggcccaggcggccatggctgcctgcctaagattcagttagactttggctgaaaggctagtcaatgactcttcctgagatctccttgagtaacaatagctcaccctgtttcaggcttgtctccctgctttcctcagccttgtctgctcctgaggcccatgtgtcttacaacgtatccttgcttccagccattggcatccgtggaggccagtcccggctgggttttactgcttttcctagggtgctcactctttcagcacccctgcctagctcctgctgtttgggttttttcagtgcctgactaaaggctcctgggctggtcttcagtatccctagtctacaccctttgagccgctccctccctcaccactgacctggttccttttatcggatttatttttattttatgtgtatgagtcttttgcctaccttcatgtttgtgcatcatatgtgtgcagtgcccacagaggccagaagagggcaccagctcccctggagtaagaaccagttgcacaataccaaacaggtgctgggaattgaacctgggtcctctggaagagcagccagtactcttaacctctgagccatctcttcatcttctgtggaatattttttattgtccccattgtacagaggagaaagcttaggcctggcgaggcagtatgatttgtccaaaaataggtcagtcaactaaatagaaagcagacatcccacccatgtctcacagtaaggactgaactatgaactctgaagtcacagggctcctcctaacagtcctccctgttatgatgggctgaacattcactatttacccagtggagtctgacatcaagagttgtgcctgatcttgttaggatgttcaaggagtgctgccgcagcaaatgagcctgaaaacttagtgtcttaacacagcagagatgggtttctttcccacacgctaagtacaacattaaacccttccactcaaccctccatccttcccggtgacctgctggagcttagaaaaatgaagagactgaaggctgacaaccctggctttcacaaactgctcccagcatctagggttgatgtccagacatttagtaccagcactgagtttcctgcctgaatttctgaattgctttatttccagccgttgggttttgttttcccctagttagtaagactggttaagacattacctggctttggagaagctatacagatgcaggtcttctgtagaggaagaacatggacacagccatcgctgtcagagccttgcctaccgttctgctctggggctgggtttatccggtgttacagtgcagcctgactcactgagataactgccacacactcctgaatccatcatctgctctgtgctagcctgagacccgggcatctcggaagtgtggtctctgagcttagaagccttactctgagatcagcaatgtctccctgggcagtgagtgggatggaatgacacccagcccatacctctttctaacctgggaggtacgatgctacccagagacacggccaatgtaggcattcgggattattcagaattccaaggataaattattttcccgattcaccgttaagtaaatccctttttacataaatttacttttttaaaagtaaatttcatttctctcttcagcctaaagaatcacacgttgatcccataagcgtgccccctacttcatcctctcctgccgaggactcggagctttctggtgagccggtaccagaaggaaccccagaaacgaacttgagcatcattggacacagcagccctgagcaaggcaagtcctgacacgcacatgtgagtggcggtctatcaccgagtgatcgacacgtattcaacacacagagttcacgtcatcatcccttctcccttcaagggaaactgagtcacagagaaatcaggtagcccctccaagactgtatggcccgttagcaacagagctggcacttgctctccaatgtctgagcttgaaaccctcttcagacttccctctgctttctctataggaaagcttaaaagaagcattgcagctaattgtgtacctactgtgtgccgagtgtgtacatacttctccagttccacggtgccatctagtcagtagagctagctgcaattttaccagtggaaaaagtcaacccctggaaaaggccagggagtgtgttcacaagctcacagccccatctccgaatctccacttgttctgatttctgctacctacgttctggatctcagaggatctggtcagctaactgatggctagaaacaggcatgggtcacccagtgggtaaatgacaaccgaaagcaagcctcagatcccttcctgctgctcctctgcttctgcccccccccccccccgccgccactgcagtgcacaagcaaaagcccagagaacatctgtgactccccctaagcagcagactgacatgcacccgtggcctgaggataccgtttcgtgtagccctagctgcagcaaaggccagagctctgagatgtagaggcaaggtgatttccagcagcactgttcatccaaattgcctgtagcaaggatttgttaagcaaacacaatgtcctgtatccacgtgatggggatgagctgatgagttaaagacatgctgtggagccttcaccataagagtggatttcaaaactactaaagccaacgctatgagcacatgttattcgcatgtttgggggatgcattagccatttggtacaacatccagtgtggggtaggactgcaggtggttttgattctcgctgtttaacttctgtgtttcaaaacatcttttacggtagtagtgttcttgatctctttgcttctgccattggctaatgagagttattttaacaacggaacttggggagtctatgggtaagacaccaagaggactagacagggaaattataaataatttaataatgttacaatgaaactaaggagtcttgaagatgtggcagtaggaagccgggagggcagaaggaatgccagccagctttgagagaagccctccgcggttgcctatttgcattggggcatggctgagattgcaacctttcttaattctcgttggtgaattgtaaccatccatgcttcctggtgaatgagagggtaggctgcactgtggtttccatgctcctagcaacacagaaacatcatcaggcatggatactgttgtgttggtctgagtagggcaataggcagggtggcttttccagtctgagaaggcaagatctaaatggaggccgagacttccacctgagaagagcctctcaccgatacccagtaacagctttgctcctcatctagctgacagacggccagagggaaacccagagctagcccaagtgctccttttcttggtgagttaacagcccggatggtggagagaaggaagcctgtagcccaagtaccatctgcctggctctctgataattgaggctttctgacagtgtctgccccagctccagccagggtagctgcttgtatagcaccccctggtggtcagagcagggaggatccaagcacaggccaatgcgggacagaacactcctggagttctcagtggtcacacaggggctgctgaagatgtgaggggacatgtgaatgctacacgtatgaagaaagtcttgcatggagacaagcttgtctgtcttaccagctgctcccagtcactacttttgctgtgattttgctcctctgcagaagggtaatcaggataagacagatttggtagcacaggcctgtaatcccagccaattaggagacgacaacaggaatatatcataagttcaaggccagtctaggcaacttagtgaaaccctttctcaaaataaaacacccgcacccgcacacgcacacgcacaaagagggccagagatacagcgtagtaatagagtacttcttagcttgcaggacatccaatgctaagtctttaacactactactaatactagtaattaataataattattattactattttaaagttgtgattagagcaagatacctgccttggagtgttatcaaggaagctgagaatgaggaaatctggtctggcaggaggttggtggcacagcgaatagccattcagagccctctccacaaatgtgtattcagtcttcatagggttgtaggaacagcggtgagaccgacgacgaaatgataatctcttctctttccactcctgtaatctggaagaagccaacattcagcactgtgatttagcggtatatgcacataattatttaaacacctacacaaacaatatgtgtgctaggtaatatttactacatagcatacatatgtaatagaataatcacacagaatgatagaaaacacgtgcacgcataggtagtcacctttctcttccgtgagtatagaactccaatgctaatgagtatttgtgagtgacttgctatgtgcctggcactgtccagtacactttcctcaaatcatctcggtcggataatacagagtcatcagaatagtttctaccctccgaggtaggaatcatgatccccactcatagatggaggaacttgggacacaggttaagtatctgccccacgtcacattctggggcatggcaaagcatgatttcaggcagcaagaggtgccagcacgcatgatggaagccaccaggccctaggtccttgtcccgttctctaggctgcctcttccctcctggtcctctatctcggagtcattgacatcttcccaagttactatgtacaaagttgccgtgttctcttccgagactgcaaagcatagttattgacatcacaatttctgctccctgtagggtctggtgagatcctgaatgatacgctggaggtccatgcgatggatggggaccctggtactgatgatggttcaggggatggagccttgttgaacgtcactgatggtcaggtgagtgaatgagtggtaaactttattcgatagcctaacggggggggggtgttcatggagaggtcttagttgaatgtcaccaggactgatgtcctgtggtatggaaagagcacagtggtcaagctccagggacacaccagcgagggtggaggagaaaccaccccagcttgtcttcacccatgattggcgataaatacaaatgtagcatgctcatgatgtatgggatccttatgaagaccgcaggacaggacagggtcaactgcaggcttgcccacgccctccttagcaattgtctttcatctttacaaagccagtttgagaaatggcttgatctgataggggcagagcaccatcttctcaactccagcatttgtgtacacacacacatgatttgtgtacactcacgcatgaaggcctgagtgtggatactcagcccatgaaagagctggtggcagtgacgggtctgttaccccagtatgagtgccagggagtcaggtaaaaggatcctagacgcttggtagccattcagcctcctagaactggtaagctccagagttagcaagagacgctgtctcaaaaataaggcggagagccatgggtgaagactcccatgcgctcatacatacatgaacatgaccatatacacatgtgcactcagacctaattcaccccacatgaaaccctagaaaacaaaaataacatgccatccccacatcctatgtaaaccactatatagaccaggctactgtcttcaacctcacagaaatttgcctgtctctatctcctgtgtgcaggggttaaatgtgtgcaccatcgttcctggcaaatatgtggcattttatgacaccggcagctacagctgttccatttccccatttgttctgagaccttgtagacatcttttcttttcccagaggaaactaaatgacagagaaagagagaaaggcaggttagcactggcgtgcactggggacagagtcctgcctgcacatagctgaaaccacaagagcaatgtcattatacttatgtctggatagatgtacaggagtggtcacaggaggtctgtgtgtctaaacagtgtccagagctggagccagctgactcaggaatcagtgacctatggtcacccagtgtgtaaacagacgttggcatgaaatgtgagacatcaatgtctcggagatgtcctctgtcccctggattttgcaagtctgggactggtctgagacttctgtggtgaagtcacaaatgtggaggttcctaaggtcagggagctgcagggatgtcagctggcagggtgtatgtaggtggaagacccaggtactcagttctctccagccataggcttgttgatcagagctaagggaccaacagcagggtctctcaccatgtcctgttttcaggggttatcagcaacagcaactggggaggccagtgtgcctgtcaccactgtcctggaagcagagaatggcagtatgcccactgggagccccaccctggccatgtttacccagagcatcagggaagtggacactccggtgagtagcttaagcatacttcccctgctagggcttgttcctggtagaagcaggcactagcctcctgtctacacaatgcagagtagcaatactatggggcgaatccaggtgggcacgagcaactggctgcagggcattcactcactgggagaggcttgtagagcattgtgccacaccaggcactggtcctgctagccaggactgatggtcaataggataggctgagttcccaagacacaatgattaagggacatagaagtccccaaaacaacttgtgagtatagaaaaggggttcagaaaggtagaaggtgaacctgagagtctgagggaagtatccaggccaatggcataggtagatgttataggtgagggttagaggagcaaagacccagaggccacacaagaactgatgaagtacagggtgcctttggggtctgcaggggaatgggggggacatcctgatgtcacctaaagctgagaagatggatctggagaggcccagtacatgaaggcttctgctgggcagcctgacaacctatagtgaagttgcagccattgaaaggagagggtggagagatcttcataggattaggattctagaacaactgctttggcctaaatggagaaaggacagaggagtctggcctgggtacaggggcacaggtccaggctgaatccaggtccaggtgaacatgggtggccatggacatgtcagatctttttaaaagttccagtgagcaagggtctggaaagcatccattgattttgtcagcgtgtttctgagtggcaatggagagggcaatttgaaatgtggaggttctcagccaggggagcaggaggcaggaagcaatcaggtgatttggtggttggcagttgggggtggtgaggtcagagactaagggcagttagatgtgcctgtcctttgaaagtgagcgggcacaggacacaggtacaagagaggccttggctatctgtcccctaaagccacaggcatgggtcaaagtggtggtccactagtctggaccttcgggatatctttccatccaggatccagaaaatctaacaacaacagcatcaggggatggtgaggtgcccaccagcactgatggggacacagaggctgacagctcgcccactggagggccaaccctgaagccaagagaagaggccactctggtaaggagtaaggcgagctggaatagccttcttgcagtgtgtgtcttacactcaacaaactggggcagagggggacacctctctgaccaatgctagttcagaggtggaacttgccaggacttctaagtatacggctcagcccctgtagtctagcagagtctgagaaaagaggcaggtaacctgtgtggttagaagagtagaggggagtcctaggactgtatgcagagccttttgtccccaccagcagaggccaggggccaggggtatgccctacatgtgaggggaagagatgatgctgttgctgtgggttggtagggtgcagacaggcaggcagagcagggtgaggtcaaggtcatactgtctgcagtgtagagaaggctgaatataggcatcccaactggacagtggacccatctgtctctgtgatgtccccatagaagctctctacccattagattcaaacttgcctcctcatgccactcctgggttcccgcctcatgtgaatggagatagtctcattccagctgcttcacatgaagttaccttccctcttccttctgtctgatatccgatgagaacggagtccttttgacttttctacgtaaacctgtaattgactggtgtggatcctgcctgagtaatcttccccagacagacagttattcactcacactctgtagtctctcacagagcctggctgggtgttgcccctcttctttgaggcttttctgacctcgacctactgacccagatcctctgaccttgacctactgacccagctcctctgagacgccaagtagggtctggtccctgcccttcttggctgcaccttggggcttctgtgtgccagacccaagccacggcctcctacttcaagctcctctcagttccttcttgctctgcagtcttcccacactcctcctcactgcagagagactctccccacccctgtcccttcattcatttgtccttcagagttagcctaacatgggctgtgaaggctgctggccttatccttagaagacttcttcataatggacttggtaaacaggctccatgtgtagtgcaggcctggctccctagcacgtcatgagcccggtggggatcaggtccaatagacctggcttcccgggtctgctttgcctctctcaagtggtgggtgctggactaatttgctgagtggattcgtgaaggcagagggcagctccaagctcctcctgtctgtaacacacgggaaggcagccttctgctctgctgtgttctgctcttgtatccacacaggctagtgacagaattccccaaggccacctgactgttacacagaggagttcaaagttccctttcctctcttcttccgctttcttctttaaagacatagtatgtgtcacagcaggagaaaaccaggaaccagagtccatttctaccaagtctcagctttaatagaagctggataatggaggagctagagaaattacccaaggagctaaagggaactgcaaccctataggtggaacaacaatatgaactaaccagtacccaggagctcttgtcttctgcatatgtatcaaaagatggcctagtcggtcatcactgcaaagagaggcccattggacttgcaaactttatatgccccagtacaggggaaagccagggccaaaaaggggcagtgggtgggtaggggattgggggggtgggtatgggggggcctttgggatagcattgaaaatgtaaacgaggaaaatacctaataaaaaaaacacaaaaaaaaacaaaaaaaagacatatatcaacaaatcttgaataataatctattattgtcgacactgaaaagcctgtcattctccaatctgattttcacctttcagtgctacacacaggttaatacagtcactgcattaaatcactataaaaatgtaaaaaaaaaaaaaaaaagtagaagctggagcttggctagcagaggaaataggagggccgtctgcagaggtgatgtactccccaggaccaggagtatgcaaactaagcctgagatatatagcactgagcagagatggatagctaggtgggtggattccagaggtaggctgaggatgcccaggaaggcgtattctgactctgagccccagcagcttgtacactgaagcacacagtccttgctcagtgagtacagcaaagaggcagaggagttgctgagatctgattgtccccgtggtttcctttctgtagcatgtgcacagccaccgaagtggaagtgggggtcatgtggcatcatctcatgccagctctcttccagggttcacacggtgaggaatggttaaccccagctgtgtccaaaatgcccctcaaggcttttgaggaggaggaagccagtgggactgccatcgacagcctggatgtcatcttcacacccacggtggtccttgagcaagtcagcaggagacctacagacatccaagccactttcacgcccacagtggtccttgaagaaaccagcggggcccctacagacacccaggacgctctcacacccacagtggcccctgagcaaatgttcactgctgtaagtcccagctagcatcttctctgatatgtggggacagaacggtcagcattctgagccattaaggtcctctgcagagacacacacaacttcagctctgttgtgagagcttgggagactccaactggacagggaaaagagacagtgtttaaaaggggccaggttgctggcttttgtcccaatctgctacatcctagttttgactactcattttcctagaggtcaatgtcccgaaggtgggaaggattttaaggaagtcacttctgtgactgagccaagtgtgaggatgttggtaggtaacatgttttgacattgaacagccaccatagaagtgacacccccaagtcatgcagcctcgtggactggggtcacaatgacccctcctgtgaatatctttgacaggaacccacagatggaggagacttggtggcgtctacagaggaagctgaagaggagggatctggtagcatgccccccagtgggcccccactccccacacccacagtgactcccaagaggcaggtcaccctggtaagtgtcctgggggattccactcggctagcagatctttcggtgtggagaaaggctgccccaaccttctcagggtcagttctcatcttggtttgtaaagacagtgtttgagggcctttggccagacaagccagggcagactgtagcttgggtaggaaaaggccaagagtaaagactttgcttaggtttccaattgcctttgcaattgcatcaggattagcagtgtcacagggcataaacactgagttaggactgagcagggtctgtagaggcatggagcataaatggcatgtggaccttcgggggctgggggtctgaggctgtgggctgccactccgaccttgagctgtcctttggttctgcaggctggcttctggtctggagtcagttcagaagatgttcagatccatccctgcacacccttatggtggcctgatagggattgtcactgactcagagactcgggcaactcagagtcaggcttgtgtgaatccgggcgaactgctcttcaggggggagacagttttcaatgagaacctcctgctggtgacacacctcagtgtgacactctgaaagccgcccctcaaggtccagtcatgtgaccccttcagctgcagtgctctggtggcctgtgctcggggactgcagaggtcaggagagctctctgagaatactgaatggcccttgcccaagagcgtctcccagtgactagctggttaccatttgccttcctttctcagtggttagagttgccctcaccaatcaactgatttgggacctttgggttgtttgtttggtttggttttattttagtcagaatatcatctgtctaacaaaattaacagtagcctctttatgttctctaatacttaggttgagtttttaatgtcccttgtcagtttagtttgactctgaatcctcttcattgtgcacattatgttgatactgtataaactgagggcataatttttccatggtatagttaaggtgtgtgtgtgtaacacacacacacacacacactcatatgtaatctatatatattacatgctactaatccctcctaagacaccaagttttccaggaggggatatatatatgaaatatatatatatatatatgcatatatatatatatatatatatatatatgaatgagatgagagagacagagacagtcagagagacagagagagagagggagaaagagagcagtagccacatgcatttggaagagtgatgcgtttggaagagtccagagcagagaaataaagaaagaagtagactgtgtatatatagccagcagattggacctaggcaggactgtctgtgagacaggagaaaagaacaggaaatagaaaatcgagaaaacagaggggagagagggagagaaggggggagagagaagacattgaggctagcaaggttataagtgaaggagtagaattggggagggggaagctcatgagctggagagaatttgtggtagaggagaaggtgagaaggaagtttgaaatgagtgtcaggtacttgcgctactgaggagccatgaggccagcgtgcactttgatatgctaacaagcaccatagctgtaggtgccttctgtccaaggtaaaggaaatggttcctttagttagaggggaaccagcttcacaagttccttgaggatgctggcttttatctaaccgccagaaattctcctacttagacagagcctatttctgggtatttgagctgccttttggagtttgaggaattggagtctcctttggatctaatagattcatctttcaggggtcttttcatctctgtctcccaccttcttttttctgtttgccattgatttgggggggggtggagaaactgggccaaccacccttgtatccttgagttttctgttctgagaagttgggctgttggggccagtcatactggtgggttgagggtaggggtgagtgggtggagcttactgcttctgggaaactctgtccacatatattaatgaccacaaaactgcatattaacagcccgaaattaaccaccacacaattgcaaccgggaatttgggttcaagcatcttcctcaatggagacagcctgatatgtaacaaaggatttttccctagaatgttaacctcaatatctgtccataatagaggaaacttgggactaatttaattaactagccaaaggagactaattgaattaaagtctattcaaatcatgggaacattagacataattaaaattattctcatttgtacccagtgttggagaacatgcttaaggtgccatgctaagtgaaagaagatggctataaactcgagtgtgctgtgtggtcttaactgtttggaaatacgtactctggaagggaacgctctccttaaatgttggcagtgttgcttcagactggtgggactgtggcagtgtggttaggttcttcgtgtgtttgttgtttttttgctgcagaactgtctaagtttttgcagtagatttttcttccactggtgtttgtctagttttgtagtgttgggggttgaatctaaatccttgtacacgctaggccagcttcctaccatggagtgacattcctagcctttatgacagaatttttaaagtaatgttttaattgatttatttatctggcgagggtggcagccatatgtacatgagtggaagccaaaatagggcaccagctgtcctctatcagactttagctattctcttgaggcaaggtttctctctgaacctaagccccctgcccccttttctcaactagtcttgaagccaacaagctgcgtcaacccttctgtctcgccacactcctacaaaacaaaagcaaacaaacaaacaagcaagcaaacaaacaaacactacagtcatgagcatgcgaaggatgcccagattgttagcgagtgctgggatccaagctctcatccctgagattgtgtagcaaccagttttatccgctgagacatctctctaaccctagattctttggtaaatctctaagaagagaatgagaggaaggaggtataagagaagcagggagggagaggaggagtgtggagaggggaaagagaagaaggagacacaggaggaagacaattaggaagagatggggtaggcgaatgagcaactgagcaaaacacagcaccctggcacgcaagtcgtaaaggcggatcattgctgagtgcttgtcaggcacctgctaggtgccccggcttctgtgtggaaagcttaagctcagccaagagacacctgccctgccctgggacagtctcagagtcattttgaatcacggaagccatgaggttcagggagtacaagacgagcctgactctgctgctcacctgcaaccaagttcttcacgtctctttgcttcatgccgctcgcaaaggtcaaggaccactgcacggttgggtcctaccatgacttgtgagattcagtgagttcatggatagagagtttgctgagcacatcataactgctcaatagatgagctacatgcaattatgtatcccatgaagctcagggagggctatgctcacatagtttctggaaaaagggatggagagagagcatggttgtgatttgagtatttgtgctgtctacagcaagccaccattatcagacatgacccagatactagtcagcaaagctcacccattttaaaattaaatccttccattggctgagtcctttgacctctaagggccctggctttccctatggaaagtcctgaatcacatgctttgtccctggctttccccttgagagggggttgaagaagacgaagacacagggcctgggtttgcctctcggcagatggaggatcttagtagatatgtagtctggggtgatgggggttacctgtggctcagctgccaggatgaaggggtgcttagacaaatgctgcccgaggtccaggtaacgggttgtcttctggaagaactgctagggcaagctattccaacatcactgtgacccaactgtgattcctcgggactcctgctctggcccctctccatctctgccctgggcctctgttttcatctttcttggagaacagtctctagggcagccagtggtccgtgggtgaggtgtcctccttggtccatctctgccacttcagggaacttccgaggcagggttcaaaggggattcggggagccctaagaagaagcctcctgacacccacactggggggtcaatgtccctctgcactgtccttttgttcggctgaaccattctttcatcttatttgtcaggacagccatttctctgcaggctttctgacagctgagagctcctcctcccctccctccctccttctcccttcctgtcttcctccccctctctttctcctcctcacatggacacttgtggcatccacagacatttccttaacaccgttattccaggctatggactagaggggctctctggagaagtccatggtttaaggatgggaggagtcaagacctagagaggctttccggccgtggtagaatgagcagttcactggttccagatgccaaacctctggcagggcccaaacaagggctgcaggaatcctcaggcaacacccgggtttgtgcaatgtgtctgcatgtgcagcttatcctacgtgccccttccagtgggatgcgggaacaaagggccaatgagccccgagaaccagcaggtgttggttgtagggggcagggtgacagggtatgccttgggccatccttataaaaggaaatgccttccttcagtttgtgtttaaagattaaaggtggacagtttctacagagaggaagggagcagtgagatatgtgtcattgatcccgtgggtctctttaggatgatgctgtggaggaggggcattccctggacctccagactcgatggctccttcagtcagacctcaggcttccactgttctggaggcctgtatagggttcagttccatatttcattcatatcattatattttctgggcccccaatggagcaagaggggtaccccaattagtccctggctcaagacatggttctttctctgggcttactatctctaggattgacaccccagaaacaaaccatgaatgccttcaatgggtccctctctgcttcccatttggcctcccaagttccccaagcctagctgtgaggtactccctcctctgtcagatgaaagcatcaaccttcagtggggcttcttacctctagtgctactacctctgccttgtttactgttctattgctgtaaggaggcaccatgaccaatgcaacttataaaaaaagacatctaattggctgcttgcttacagtttcagagggctagtctcttatcattaaaggagcacggtggcaggcatgcaagcaggtgctggagagaaaatgagagcttacatctatctgaccctcaaattacaggccaagagagactgagactgggcttggtgtgggcttttgaaacttcaaagccaacaccaggacatgccttttccaacaaggccacacctcctaatccctcccaaatgttttcactatttggggaccgagtatgcaaacataggagcctatggaggccattctcatttaaaccatcgcaactcccttctgatggccacaggacagtgagtcctgcccctgtgtctaacctacaaccctgatcctcctcggaccttagtgaggtcttggcatagatacatttgacaatcaataaagctatacccaagtccttacctgcagaatgctttcacactggaagatacctaggagctaagtctggagatacaacagaagggcttgaaaggaagctgagtccaggccacctctaggctgtaccccagggaggctgaggcaggactcagctggaaaggggagtatggccagaagagaagttggccatagacattttaaggctatagaatatgaacacttgaggtggcataactgtctacagagactggaggttgaatctgcatgtggggatttctttttcttcaggtaggagtggaagccgaggggtcaggccctgttgggggcttggatgagggctcaggctctggagacatcgtgggcaatgaggatctgctgagagtgagtattaaggatttggagggctgatgttggggaactgggagagaagatcgtgggtcaggcaacagtgactgtagattggccccttgggaactattgactcttgtgtgtggcagttatcacacactcccctttacatcatacatgtttgatatttacactgcattttcaatacgcatgagcctggatttgtgttgagaatccccttcgccaccttcctccttccctggaatcagttcctttctccctcatagcaggtttgttcactgaccttcacctctacccatgtctcccgcccaccccttatttatgaaagaattaccttggtttcttctatgtttggatcacagctcacactcagcttctagtgtaaaatcctgcatagccccccagtctgctcttggcccattcttggtgcctatggcacatctggcctgcccaaggctgggctctgctagtcctctttaaattgctcacagggaagtgtggctggttctagatgcagctgttgccccatccttggccccaaccctctctccagcccttcctctgagccctgtgctaccccagcgtgaagctcgacttagctgccctctgaccattactcatgcccagggctgggaaggttctgggctctgtgaatgggtggtgtgaaagcccagtagatctaccaagaacattctcggctggtaagatctgacagcccagcaggaggctaaggaaacaatcccctttagtaagcatttcaagatttggcctcatcttgaaggctgtttggctgaccttatagtcaattagaaagctgaattagccaaggctcctctgggactctagataattggctctttatcgtatgcaccatttgggagaaagcatggtgtgatctgcttggaaagctgtacattcaaatgtcagctccctgctttccaactgcgtgggtgtgagcccttgagcctagtgtctcctcgagcctcagtttctccctgtgcaaggaaccccaatccttctttatggcttgtttcgaagattggaaagaaggttaaatacatgcttggtattcagcctctctcattgattctaataaactgtctttcagggtccgccgggtcctccaggcccaccgggatcacctgggatcccagggaaaccaggaactgatgttttcatgggacccccggggtctcctggggaggatggagctcctggtgagccaggaccccaggtgagcaactgcagccttctccctcaccctatgatcatggaggtttcaatggggctccttttcacacacagatcccagacccagcactacccaaggctggaaaccaaaaccttccccatctgaaccattgctgagactctagggaaggacagccaagaacgttctgtatgcaccagtttccttatttgtgtgtgtgtgcgcgcgtgtgcgtgtgtgcatgtgtgcatgtgtgtgctcgcacacacacgtgctggttggggttgaaggctcatgcaggttttggaattgaccacagcataccacagttaggcctggtatgggaaagccttgcgtaatctattcctactctgctcctgatgtccttcaagaacagagctctgagcaggtaacctagagagagcagagtgggcttgtcttggggcacaagctgcaagccaactggccttgagttccccacgcttctctcctcctcgtagggttttgtgtggtttttagcagagattctgtgaactaattgtcactgatattccccagggccccgagggacagcctggacttgatggagcctctggccagcaaggaatgaaaggagagaaggtaggggacaatgtgaggttcccacccaggatgccagcctggccactctctcaccataacctgagcttgtcccctgtggtattctctttcttcacctctctgggatgttcccaccattgggctcacagtccccttacctgtttctccttcccactcctgtgtgccatagcatcactgaacagtagtgacaccatctacctcgtgccctacctatgaccttgctgtgtatcctgaccagacatccttctcttcctgcccaccctgtagcattaggaccttccctgatgtcctctcctcctacagtcatcctctgactgtgcctgtccaccttcaggtagcagaaactcaccgactcctgagaaaatatctatggcaccctgttgggcaaagccctaatgcatgtcgtggttggcaccagctgtttctgtagcatgtgactactgctcactgctacagctctgaacaacaagccagttgctgtatggtcctctctagaaggttctaagccgccacatgtggtatctgccttgtcagaaatgccacttctttttgtcattaatacctatttcagatacagtgacccttctttatcctaatggttatgttataagacccttccccacacatttatattgttaaacaataaattgttccttgcacacacacacacacacacacacacacatacctatttagtatctaacttaagcacagtaaaagattaactgcaatatctcatgatacaataaaccagtcataacaatataccatagtaaaatcactggtatcactactgtctactttagagctatcattaggtaaaacaagggctaatgaaagggtgaatgacggtctgctgatgacagctaagatactgatgagttggtagtatatagaacatggatatgctggaccaagagattgcttatatcctaggtaggatggagcaggaagctgtaagatttcattgttctgtcgagaacagtgtgaactctaaaacttgtgaattgcttatttctggaactttccatttaataatttcagcctctggctaacagaaaagctgcaaccaaacacagtgggacttggataaggtgagggggtactgaatgtccttctcttcactcttttggggtcagtgttttgtttgggatttgttacgatgaggtcatgttacctcggctggattagcctccacccactgtctagtgctagaattataaatgtgttccatcatgcctgacttctctcaacatttccagttccttcttcctctttctgagagtacagggagaaccttcttagcaatgacacagaagttgctagcattcctgtgtacccttatcctgccttagagccgaaatatccttccaacccagcacagcctctattagtcttttatgagtaagtggaatattcttcaaacagcatcttaagctagcatttctccttagcctgctttcagtcttctgaagccgcctactacccatgcctgtgctcttggggaagggcaggtcatgcccctatagccttaccagacataatgaagacatgcctctttatacaaagagagataataaataaaaacgagacaccttgcactagcgatatgttaatgaaggttcaacaaacccactgtctaggaggtaggggccctgtacctcacccccatgaacatgtgtgaagtgtttcctgccggggcaccatggccactgaatccaatcccagtttccgtccatcggccttgagtgtgcttaactgaaagggtaacctgatttttgttgcaaatgaatttttctcagaaaaagaaacaacggtgcaaccttagggaagtcatttcatacaaaacaacagcttcataagaaatctaggtctgcgggaagccccaccaacctacacttaccttgtctgctcctacaaagcagcggctaagcctcccacactgtctgtgcttgcagacaccctgggctgcatactgacgcccctgttggctacagctggctcagctgcacagcaaggaggaagagccaccctgccctagatagctgctgcagatctattttgctggttcattcctggcatttgctaagagatccactggttgtcctgggggcatgggatgctttggggttaagcaaaggcagactctagaaggacttggacatttgcatttggagagttgacgggaaaacaaacagtctggcatacagtcacatatatgacttcatttgggaaggaaacgagtgtctcagggtcctcatgagacatcagctgtggtgatccatttgactcccaactcctgtcacagtatcttcttttggctcacaaatccttattgacaaggtctagccaggacctcccatgactggataaaccgagttataagaagtcttttctcatgctatcaatctgggctataagcccaggtaattacgcaaaatggaggacagtcccatgcctcccaggctggcctccagctccataagagctgaggacaaccttgaactctaatcctcctgcctctccctcccagtgctgtgcactgtcatgcccagctcaaagtgagttgctttcccaccatgcagaatgagtaagactctatttatttgcctgggaaatgtaatactcatatataaaaccagtattaccaaacatgaacctgtcatcaaagtgtagatggtcattaagagtctatctagtagattttttatgatgctcagcataaacagaggtaccttttatcttccccatgctaagctgaacagctaaccatgacacctttatcccaggaaggaagaagtgagaatggcctattttcccagctgcagagcagacctgggagggcagttgaggatccttctagaaagcaggatactcggatgttattccttttgcattgacgcttctgcctacagttctaccaggactgaggcatgaagtcttcagggttcagggtattcatggtacccatctgtcgtagaaggttctgagacacccacgcaggaaagagtctatactctgaaattttcttaactactcagaatttctggggaaacttgagcacccaagagctgtctttgagtcatctcactgggctggaaatgtcgacgtagactcagcttctgtcttttcttgtcagttagaggagaaatttgatgatgtcgtcacaaatatctcttagatatcccaatctgctttggagcttggctcgtgtgatagcatcagggcacctttgaagactctgaggtagaactgcttttgcctagaatccataaaccagctgtgtttgaagtccaacacaccacagtattggcttcttggcttctctctattatcatcagttggttttggcatatttgtgtggagggtttccataaaaccaaagagactgtagtctgtagaggatcattactacgaagcccactcacaaaccctgcagactaccctacaaggaactccagcaggaaaaaaacgtcgtgtatctgggcctttcatgtctcctttatattgacatcttgtgatacccttgataattcagttcaccacaatgagccaaattttctactgagttctgttagccttcatgatgctctgactaaatacctgagaaatggtagaaggatttgctttggcttttggttcagagatttcagctcatcgtggtgggagcccacagtgagtcagggtcagggctcagaggctccgggcatcacagtaagagtcagtggtggggcagtacagaagagctcgtgttagccagaaacagagtgcatgcctgagctagcagctctccttttcccaactgtagtccatctggacccctagtctatgggtcatgccactcagattcaggctcatggcctccctctttatttaatccacaccacaggcatgcccagaagtgtgatttactgatcttgacattctcaggcccatcaagctagtagttaaaatttatcatcacagattctaagctacaggacaggcatggtagctcacacctttagtcctggtgctacagagccagaagcaggaggatccctaaaagtgtgagggtaccctggtctgtttgcatagtaagttctaggccagccagggttacataactgagaccttgtctcaaagtgttaaaaaaaaaaaaactttaaaaaaaagtgaagtacgatcttatgacacacagcactgttgtgagtcagtcagctgtagagttgatctctccatagcttcctacctacaaccacatatctctactagttggaatttccaagaaagtgctggactcaatgcacacaagttcttctggctaaggagtggtgtctgctattgtttcatttcggaagttcagcagatttcctgagctatttctcacagttctcaatttttaccctattcattcaggaaagctccagtaaggtagacccttctatcccctggctaatctgctcatgttccaatctgatggccaccatgcctgcgaggcagtggactggacctaagccctacctttttcaagctgagtaaaataacgagagagagagagaggggggggagggagagagagagagagagagggagagagaaacagagagagacagagagagacagagagagacagagagacagagagacagagacagagacagagacacacagagacagacagacagacagacagagacagacagacagagacagacagagacagaccagagtgtaaggtagtttctagaacttcctctcaatctgctacaagatatacttggcttaaatgaacttgggaaagctattggaaataatgcagtttcccctttcatgatatagttctttttaacgggatcaatcgcaagtgcagctgaaccttaccagagttggggcaaccttaggtatggttcacaagagccccgctggtggttgtgtgtctgggaatagatagttttcttaaggaggtactgaagcagacagtgtgcaccatgtaagtgctcggcccaaagggaagagaaataagaaactgcagctaaatagggactcagtaacttgagacacatttctgccccaggtcacacacatttgctcagtgtgcccctgttggccattggtgaaagtgagggtgggggtggggtgagaatggggatgggatgggggtagggatatgggggtgggtgggtgctgtctttgatcatgactctgcttagtgttccatttccttgtgtctccaaacagccaggacatctctgatggcttctgggctagggggcatttgagcttctgcaggacatccttagggccagctacagagggttctgactgtgaccattgggtacactccagcatcctctccctgccctgggagtgaggtgccacctccaacagactcaacacttttcctgctcaaatccttagcccaaggactgagcagggtctcccaaccaaagagccgttactgcgatgtggggcctttcctctatgtccctatactaggcacctgtcttccttcagcactgttggaaagagagcccacacccatggaatcctgagcctcaccgcaggagcctgaggaaggttatcaacaggcccctgagcagagagcactggacagagaagcctggtgcctgcctgtgggtctctgggtggcttgtctgtgtgctgggctacccagcgatgctctcacctttgccatttacctgaagaaagtcctgtaggctcattctcagtaaacattcccagagccagctggaaggaacctgaaaaagtattcaattcctggcttcttccttatgcctttcttggcagagccatgagacaaggaagtgtgtcaggctctgatgggaggtcagagaagctctgctttaggcagtctttgagtgaatttgtagttataaaagtaggcaaggtggacacacctttcattgctttctatgtctcatgcttcctcctccaatattcttgaaggatgatatatgctgtcttcagagcaggtctgtgcacagcaaactttccagattttggctgtttaaaatcttctgttagcctagtggtgctagcacttaggatgcagagggaggtgatctctatgtgtctgatgccagcatggtctatctagatagtgaattccacaccacacataatgccatcctggcttatttggttgcgtgtacaattttaggtttgaaaccatttgccccagagctttgaaggtaagcattccgttatggaggatgagctcagatttcactcccagtcccagcctacctaaagccaccgcctcttcccttggcaggttttaggagtcacttccctttgcttggtgtgctgaaatcccttggtgcatcgtctctggatgtggattctttaaagcatgtattctcctacttggtgctaaagagccttggggtggagtggcgtttaatctgggggcctctgggttgtgaagcttctgtgatttgtttttccagaaatgttcaacgtagacctcagccttctgctaaggtcaagtgcaggaatgtcaagttactgtctgcttgcgtgctgcttcctccattctctttattctttattctgtttggtcagtaattggaattcccgattatcctcctagctctatttgggcattcttcctatgcattttattcatttgtgctggttttcaaagcagttctgcatcctgttctttggtcttttctgctgtatttctctccaggatgtttctctttctcttagtcctatagagttcttcatttcaaccatcataagtttttatgtctgtggcccccactgttctcacctcataacagttcgttcttgttttgtgatttttgtctcgtcttccctcttctcccggaaagcatcagcgttcgtagcattcttgttgcgtggtgttctttgtgttgttcctgactttgtctcctccccagtgttgcctttcctcagatccgggattctttctgcgtgttggctaacaaaactggcatctcatgtagtgcctaggcctccgttggcattagaccattaaggaagtaggcacgggctacttctgaggcatacaactttctcggtggggatggaaacaccagaatgtccatctcacaggacacctcagaaactgatctcattttgggtgcccagggatcttccagttccagagcactgccctccctttgctcctgaacataactcttactgttcttatggtgttaaggcacccccaggtgctccttgacacgagtatgcaagaaggtgaggggaactggggaaggctgacggctgtcctgaagtagaaactcatcctgtctccctgtcagaggatcctgggggcatccctacttcttgtttccttcagggttacccctggttcttctccccacccaccctatgcacactcttgctttctccaccaccatgcagggcatttcagtctctgtggttcctctctggatgaagccttcttagtttcctgtctgtttcactttggcatttcaggccaggggatttctgtcttacttgaggacagtaatatagactcaccacctatctatcctacgggtgacggaggctactgctatgcatgggagttagcccaggaaaaggataagggaagatacagtctttcgtggctggcacgtcatagtctgagtcatagcttctgtgtggccgtgtgatagctgggctatctcctgccggagaacagcctttgataggttcacagcttcagggtttgaggtccagttgcctagctccattgtttggtctgggccatgtttgagacagaatcagggcagcaagatgacatgacagagcacagcttcaagctttcttggcagttgagggcaaggtggtggtgtggatgcagagctgattggctccctgtttcttctaacttggcccatggaccccccccccagcctatgggatggtgctacccatatttgtggcacgtcttccccccccttatttgatgctctctggagactcccttagagacacacccagaagtgtgcattacaaatcctcaaggcacttctcatcccaaccaagttgataatcaaaattaaccactaccccttcccttgtttaaagttgtaagcaccccttacctctatcatgacaggaggcagggtagggggcagctgccttggtgtgagtctccaagagactgctttgatctctccagcttcatgccaactgccttagtttaatctcaaggaggagggcttggttaattattgaagaatgggtttctctaggtttaggcctgacttgttcaagtagactgatatctatggtaatgtgctcagcctggagacaccagacaaacccagacagaacaagcctgttgttatagcctgctattcactcgtctgtaattctgcatttctctttgagcaagcctagcacgttgcattctaattggtccctgtgttcgtgtgtttcagggagcaagagggcctaatggttcggctggcgagaaggtaattgagaacagctcttctccccctctacttccctctccagtgtacccttgggccagaagagcgaacccataaatgtcacagagcaaagagaagcactccccagagcggaggatcaggaaagataggccagctgggatggtagggagccaatccggcaacgttcctccttcctcaatactctagtgagcacatcagccaagggaaatgccaattagtgagacagctgttctgtgccatcaagcatcgcccatcagacaatttctaaacttaattagcttcaaggagtcattttctgactcaggtgctcacacggcttcttctgggggaggggagaagttgcagctgttaactatcctgtcttctccttacagggtgaccctggaaaccgaggcttaccaggtcccccagggaagaatggagaagttggcacccctggggtcatgggaccaccagggcctcctggaccccctgggcctccaggcccgggatgtaccacagaacttggatttgaggtatgtttgccctttctgtggctgaagagtgatggagggtaaagagcactggaagccacacacactgggtactggtccctgggtagaggctttgtcaagtctcctgtgagtttcttgcccccagcatcctgcttggtccaagtaggtagttgcctggcagtgaactctgaaatccttgcttcttcctcccctagattgaaggctctggggacgtccggctgctgagtaaacccacaatctcaggacccacctctccaagtgtaggtagacttctatgaacccttttctgagagctgtcctgatgttacccctgggggaggaactcactttgatgattcacacacactgtgcctccaaccccatgctgtgctgcctgtaaggtactgactgcagtgaggaaacttgatagtcatcttcgtccctattggccagttccttactactgagcatctctgtttcatgacttcctgtcaccgtgttaggctcccaccaggtgcccaccctgtccactcgctcatctccagcaggcactgcccttgtcctgtgtggtacacctgcatgaagacactcccctggatattatgatcattgtcacacagaacccagagccaagtgctgagggagtaacttctaatgtacaagacagcttctcacacatacgggatctaagggtggggtcaggagggtactttcatgctgggagaggacctctgtggattgttgtgtgtggggactcttctgagtctggaatgggaatttcccccttgtactttgctccatcatctgggacagcatccatcggagagcttagggagagatgcaagaaggtagcatgcgccagcaaacaggaaaaaaaaacaaagaatgtctagtcatctgtttgcttattcttatcagggtcccaaaggagaaaaaggagagcaaggagccaaggtaagtaagcccatgggaggcagggtctttctagaaggtcatagaagcattatccatggactgggagctttgctctttacttccctctgctctaactagggtgaacgaggagcggacggaaccagcactatggggccgcctgggcccaggggcccgcctgggcatgtcgaggtcctgtccagtgtgagtatcacccaggttgaagctttgccacatgttttctgctttgctaagggggaatagcaggcaacctgtcacttcaggactttgaggctggtggctatacagggtgtccctgcctgcacctgccagcatgctaacctatctgttcctatcccctccatgccaccacacttgaacatacaactcttctactgggcagggtcaggagtcagacaaccgcctggaaagtactggagtcttgatgaagccccagattaagtgccccagaaaggctcttagccagttgagaagtcaagtcaaagctggagacacaggcctgagatcattttcactgctggcagagagagtactgatggctgtaaccctatgggaaagccactaattccagaacccagccgtactactgagcagagtaattctagagtcagacaagagagagaaggacagtactgagcatgctccaaactgccatcaggaagcatcccccatcttccagagtggaggtaaagagaccaagaggagctagggttatacccctgagggccagttcttattgggaggtgtcttcagaagagctcattggatggctctttgtttaaaaaaatctgttagtagtcatattccaaaatctcacttggaaagcttactatgtgggtgagtaaagtaagccttgttccactctgatcccccatttctggggaggcatcgatatgcccccgattcccagggagacagtagtgtgtggttttcatgtcaccatcaatccctatgaggaagcaaaggctcggcaatgcctccccttccacctgccccttaccttctccctgttcatacctgagtgtcatttaaacctctgtatctgccatcagcactctgatgcagacactcgtgccaaaagaaaaagtccccaaaacctgggaaaagaatggccagggttaggaggagaaagagtaggatttaaaagtgccaagcccgtggggatggaagtagacaatcttgagcacttgtgggggaagtgtaaattgcatggcccctttggagggctccctgacagtctgttcaaactaaaaatagatgtcttccagaatcgcacatagaaagctccacacaagatgatggagtaggggagaatgagttgaaggggaggggacagggcctaatgccatttatctaaagtaatgacatgcgtgagttatattacacatgtacacgtgtacacacacacacagacacacacacacagacacacacactttatatgggcacatgtatgtatgtatgtatgtatgtatgtatgtatgtatatgcttataactttaaaagagagaaggaattcatctactggataattttaaagttaatttaaaaggaaaagtgacaggcaggctggggctgtttgacggggagtgggagggctgggtgtgtttggcagtgactttggggtgtgatcaatgtactccatactgggtgacttcaattaaggtctctttgccagaagcaaggaggagcacttgtctttctttgtccttactgtgaatttttcctctttcagtctttgatcaacatcaccaatggatccatgaatttctcagacattcctgagctcatgggacctccggtttgtatctgcatctgcccttgggtgaggtctctacccagatgccccagtggaaagggttggattttagctccggaagcatagagccagagtctctcaaagtcggaaagaaggaagcctgcatctttgagtttatataacactaagtctgtggtgcagagttgtgttcagggaggagaagtgttcagtcctgtgcaccagaaatctgtgtgagatgggagagcacctggaaccaccgcctcttgggtgggatcgtgggcctacacgtatctgctcagtctcatttcttggaagaggatgctgctaatgggacactggagccagaggaggactgacacccacttcacccctcctcaacccattttagagctaaataaatcaacatatgggggaactcaatgcccacctcgaggctcatggttgacagggtctcaaaagaaggaaggcgttcccatggcacctgacagggaccagggaggagaaatgctggccataggagccttgaaggtccaccctcatctctaatggccactcagatcccctggttctctctccagacgttgggacaatttatatgaggtagaggagatgaaagtgcttggtacctcatggcacttgacaagtaactctggagccagagatacatgcctatagctttgcatagcggatgtctgctggggcagcccaccccgcagcacccagggaggtccgccatccatgttgggtggggggcgagggaaaagacctggaatatacctcaagatgtctgcagctatctggaagatgcctctgcctcagcagcatctgtgaggctcaatctaccatgacctctcctgcgctgtgtctcatggggctcccatccattgattgctactgaaatgaataatgcaaagacccagtactcaaagtccaaggcaggcaaggtactgggcaaaagtccattcacatggggtctttgttctccctagaactgctagagagaggtttagggtgctagtgggtgggtagcagagcaagaggagacagcctaaacatgaatgtctgcgtctctgagctgctgggtaccctgggcccttggtagatggatcccaggcctcgccttctgtactttcttccccatcagcgtcctcctcatccttaaggctggatcaaccttctacttactctgtagcaacttcctcctaagagcactcaagtattacattcatgtctccactttttttctaactagttctttttaaaatgtaatttcttaacattgtgtgtgtctgtctatctatctatctatctatctatctatctatctatctatctatctattttcctgtcaaactcctgtccctttaatagcatcagcaacctggacttgtgacccagtggggtgaagtacactctgcttgccagaccctctaaaaatccccatccctttcataaaagtctagctcccagcgtggacccacttctcccctggcctccagcctatcttcaagcccatcttcagagctgacttacccaggttcccatactgtccatccctgccccttggaacttctcactgagtcatcactaagaggaagcttctgtggagaacagggacagtgatccacagtgggtggaaatgggcttagatccttggcaggtccctgggatcagtgacttacccaggttcccatgtcatccctgctggattaaacgggctcaggtctttgccctcccgagagactgactatagcccatgaggctcagtactcctgactctgaaaaccctttgtctttggtgtgttgcaggggccagatggtgtacccgggctgccaggatttccagtaagtactgcagtggctagcttccacctgtgctcaggggctgggctcattctgtttatacccctgagatgctgttccctcatccctcacgactgagccctgctccatcgcacacactcatatctttcatactctccgcagacatgtcctctcctttgagacccatagggtttatttttaaccatctcatgttcattttttttctgccgtaagtgtcaggttctcctgtgtgtatctacttttatgatagctacagagggctgggtcttatgtctctagccctgggccatccagccctgggcagtagctgggtgaccccagcatatcaagaaacagtctgtgaagatgagagacataggaagtccgtggtacacaaggacagaggagagccgtggagtggaaggctgataattaacagcctgtgtgtaccttattggaaggcgacatgttttttgcattagctatcggtttagtcagagtttgtgcctatgcagaaggccaagagaggccccagggggagagctgcgctgcttctttgaaactccacaacttggaaaggcctgaggtgctgtgtccggaacaaatgaagaaaacagataaaagccccgtaggagtgtgttcctgatggctgaactgtggttgatctccgcttatcttttcatactttttggaacttttaatacaatgacgcttttttcccttttttaagtgagcataaactatgaagagggtttaaaaaataccatattcactagacattagaacagaagagggagcgagcagcaaacatccttgtggttagcgggggtgggggtgggggaagaggtctgacctcttagctgcagcccccgaggtggctgcttcaagtctgagggcacattctggaacattccaacatgctttcctccatgagaatgattgtgtgctctgaggggaacactgcagaaagttagggaggtcgcaggaacaggagccaggccacatacctcagacgtgagtcttcatctgacagatttggccctagttgtcctttccttaaaattatttgaaaaagaaagatgaacaaaaagttcaccgctaaacaataacactcaaatgttttcaggacgcggctgtgatgggtagcagaccctttcgcctatcttgctaaatagcaataaagcaataaaacgccttggggcagtgggcaccatgagtgggcaagtcattgtcaggaatgttctgtgtctgctggagttggggatcatgaaccctggctgaagtgtaggatttggctctgcggagggtgctgggcagcccagcaaggggtagggtctggggcacaagcgttagtgcaggggcaacaggtctggtgtgaggaggtcaaaggaacaaagtaacctctatgatgtgggagatgacatgtgagtcccagccaagattaatggcaggctaggatgctggatcccatcttgtgatgtggatgttgggccggcacgtagaggatgtccagagcagctgggtgagtcagaccagggggaccaggtaaaagcaagtccgggtctgcccgcctgaaggaaccaacggtcagaggagttgatgatgtctaggcgagcaggaatttctctaccaaagagttaaaaggcaggaaagaagtgttactgggagtcttggggagttccagcagcgggaatcagggtctccgtatggggttcccacccttattaataaaagaattaagaacatacttaagtggaggcacaaggacattttattagcatttagaaggaaaccccagagtaggcaagctgtaaatctcacagctgcctggaggaggagaaaggagaagataaacatggagatcagccttctggtggcaggagaccacccaggggcacgagtcttaagaaaaagcaaggaagtcaaatctttgattaggaaggaacttaaaaagcacctttacgctctggccagcatccaaaagaaaaggacaggagaaatagacctatctgaggaaaggatagttgacggagtctcccccccccccaagtgcctgagaaggaaaagaggtctgacctatcagctgcagtccctaagatggctgcttcaagtctgagggcacaccctggaacattccaacatgccttcctccatgagaatggttgtgctctgaggggaccagtcttcctagggctgttccctagccagctccatgagatgctccactggggcatcctgctccaacgcaatgtgggctcttcaggcctccaatgcccttggcttctgcccagttccttgcctccttacagttaggaaaagatcagatctagtcatgacttctgcctgcttgataagagcttgttctgagagaggcttgggggagcgacagagacaaaggcacagagacagacaagacagagagagagagagagagagagagagagagagagagagagagagagagagagagagagttgttttctgtttgaggaaaaaaaacttttaaccataacacaatgccctccaatgattctttgcagggccccagaggaccaaaaggtgacaccggtgtgcctggattcccagggctaaaaggagaacaggtaggggcccaggtggggatgtgcttggatctggctggccattcctatttggccaactgtttccttctggagacacaatccctacagtgcaattcattgacgtttaaaggattcccaatcatcactattctctcatacctggatgctttctttaattgaaatttattgtcttattttttatatgtatgagtgttttgcctgcttgtaactctgtataccatatgcatgcagtgactgctgaggccagcaagggccatcaaatcccttgaaactgaagataatgaaggttgttaggagcatgtgggtgctgggacttgaacccctgtcctctggaagagcagcccagtgtgcttaacctccgagccatctctccagccaatggaaggtttttgtgaagaagtgctgtgccttttcacagacaccttctagctgatggcgtctctgatctcacacagaagggcactgttgtttctgcccttcccccgtctgaagagtgtatggctcaatgcctcctagaatgctgctctcgcatactgagccatcctatctggtgattttaagttgggacattgtgtagttagagtagatgtcatgcaggggatttctggggaagttcagggttcagagccaccctttgtacccctacacagcctcttacaatcaacttccgggtagtttttcatagctgaggaggaggggagcatccataagtagacagcaaagattctggctcctcctcatgcattcccttctccatttgtgtgctacccctctctcatcttttgatcccctagggatcctggcagtttctttcttataccaagtataataggaagacaaagacagaagtgtagtgcagatggtgaagggtacccctcacccccacccccaccccacccccatttcagaggttgcacatgggtggggctatacctccctgaagagtctaaaaggagcatctttgagaggactgaggattggaagtttctctgggctttctttctcatgcaccacattgcccccaggacaaagaaagaggccccagagacttggtcttcaacactaggaagcagagagctcagtgtgttgggccaagtttggaagcacgtgagagtggtgatgtctgcctccctatggtgggctggcagagaaagggtgggattgggttgactctcgcaattcttgtttcccatgttcctttttctatgtggcaaggtaggtagacctaagactctaggttccagaggctactcctgctgctaattctctgtcactttaagtgtctgggacagccaccaggcagctctgctccagctctcacagcaactgtacctcctgccgctctgcctctaatgcttttgtgcttgcctcttcctgctgctcaggactgcctttcctcgccaacaaagtggtaagacccacatgtcagctgcgggctttgggggatggagagagaggcttccctgctcactttgatgccctacctggccactttcaacagtggaaatgaggttgctgtattgccagcccaattgcccagggctagtgcagaggcctagaaggatgctagtttcaacacatggcctttgtttctacatgcgtcttttctagggatggtagatgagcctattgagggcaggatttaagagcagtatcctgcatccttacccccaaatctcccatcatctgttgcccagcatctaggataactctaactaaccaataagctatttgcacagaggcttgaagaatggaggacacctgcacatcaagacaggtgactcttgtgtggcaagaggcgggcaccatgcttatagtgttgcctcttccagtttcatctatttaaacaacaacaataagaattcttggaggggacaagtctcaagtcattaggaaagcaaactatcagatttgataggagctagatgtctaggatgccctggaaggacatcctatggcaagaagtatgctggggtctgagaatgagggtacagatctgtcctccttttggagcccttgaggatgcacttgaacagttaacttagacaactcatagaagaaaaatctcagaaaacattccatcatgcaagaggcttttctaatcctttagcaagaaggctttgcttgagtggcggggctggaggggtggtctaaaggtcagaacccatggcagcaggacggagagctctcaaacaaggcggcaggaggaggctggaccttaaaagattctctgcattgcagggtgagaagggagagcctggagccatcttgactggggacgtccctctggaaatgatgaaggggagaaaggtaattctgtcagcccaccctgagtgcagacatgctttggcttgccatctttggttgtatcttaagaagtgttttctgagtgacaagtgcctgtctcctgttttagggtgaacctggaatccatggtgcaccgggacccatggtaagctgggggtctctccactgggttgggacaagggctcaaacttttaccgtgcttcggctcacttagattgagttactctacttgtgaaaatataaaaggtaatgcagtaacaggtggcagagcatgtgtctgtttgtgggagacaaactacagtggttgccaggcctacacaagactttcaaaaataaacaaaacagggatggagggaagagagatggggttcagtggttaagagcacctgctgttcttgcagaggacccaggtgcagttcccaatacccacatggtgaattagctgtctataactccagttccaggggatctggcactctcttctagcttcagtggtcaccaggcatggatctaatacacattcatacatgcaggcaaaacactcttacatataaaaataaataaatctaaacagcaataaacaaccccccactggttgaccataggagtgtcccactttcactcctgcataatccactgtgggtacttcctgctcaacctctgccctccaacagtgactccagcatcttttggatccaaagtcacaagagttgtctagttggaagctgagacaggagaaagaagaaggaacgataaaggggactgggcatcaccctcgcatgttccactggtcagaactcagattcttgggcggggggagggggactcagatatgtagtgtagctgtgtgtccaggaagaagagtagatctgtgagaactgacagatgccagggagccccacaaggaccctcacatagtactgggtctgctgtgttattgctttgggggcggggtatgccctcttctcactttctgggtttcttcctgcccatctgtatgataaatggattggattcctgctagatagtatcacaggctctttgactttgctcttttaaaaacaggtagcacacttggacttttgaacactttggagttctttcttctaagaatgaactctaaacttccctgttgagcatacacacacacacacacacacacacacacacacacacactacctcaaatgaagaaagatcaggtgtggctcacgactgaaggtcaggctctgtgtaagcttcctaagggacatctcttttcagcctcacagtcctctggtgtaatcacatgaccctcccccaagtctatagacaaggacacaggggttcaaagaagataagtaatgcataagaaagtgggagacttgaggccaacctgccatgccctgtatctggtgggactccctcccccacctccacccctccacacaacctccgagagataagctgctatctatctatctatctatctatctatctatctatctatctatctatctattgaagcacagtgagtgtcaaagttcacatggcatctgtttgactgaagctggacctcaggcccggggagaaaggtttgcacgtgagtgaacgcctatgtgttccaagcacatccttcaggaaaccttctgaggcttttgagtccctgaagtcaggcagaaaagaccaaatatagactacatgggctgagagtgaaggcagatgggagagtcttgttcccaactggttaaccactcagtaacctccagttctatgggaaatgcaaacagttagtagtggggccagcaggaggctccagatggctatggcgggtgtcccactgaaggccagcttgtgcacagcttgccaaacacaggcaataagggcaccttttaatttgcataatgcttccatctgggctaactatggccctagagaccagtgtagcttatgactcttttacaaaaatgctaaggcttgttactcaaagtgtggtctgtggatcagcatccccccagcatcacctgggagcttagtaacaatgcagaatggcaggccctggcccatatactagcgcagacactcttcatctgcactttcatgagacccaggacactccatgtacatgcgcacgtggggaatgttccagagaaccacctaccaagtggcccacccatgccctgaaaactccctctacttttgcttttcacttccctgagagtaatatatatcagagatttttttcatgctgaccctctcttaatgcatcttttagggcatgctatctatagtaatggcggtgggcagaggggcacatgattatagctgctattcctcaggctccagtagacaaggtgattcctgccaggagcttggatcagggcagtgacttaagaagtgtgtggacccagaaaaccatcactggagaagggtctgtgggtcagggactctacaggaggaccgaggcattgttctgaggctgggcttcaagatgggtgggggtggggcagactaccatcctccagcctgttcttgggcacactggcacagggaggagcagagctgattcagaatagaggacatggggaccctggaatgaatgaccaatgcaaagctccatgttctgtgccagcctagcatgtgagcacctgggcacgtgaggcacgaagctgctggcttcttgctctttcttccgttctgactgaggtggtcctggctgtgtagcctttagaaaagttgggagatctgaaaatctgagcaaatgcttctaggtgaggagaggcaggagaccaggaaccgggcaggcgggtactccagggccattgccaatgtcccttcatcctgtccctgctgctctccctacaagagcagtcccagcactcccctatctctggactctgagtttcgggcatttgctagcctggtgcttgttttgcttctagggacccaaaggaccaccaggacacaaaggagagtttggcctcccaggacgacctgtaggtatcagtgttccccagactaaaagatggggcatgtggtggcaaagctgacccacagcaagagctcactaaggcatcttgtgtgtatctcagggtcgcccaggactgaatggcctcaagggtgccaaaggagatcgaggggtcacgctgcctgtgagtaccatggctacttctgcacctcatgccctggggctgcagtgcagacgagatcctgttagagtgtccagtacctcgaaattcaatgagtggggcctgcagaatgtgtgctcagggaagctttctttcttcctccattgcttccagaggtgcacacactcagccccgctcccccccatctcactctcaggagggtcctgtgtcccacctagaccattcccatgctgaagagtgtcagtctccccaatgcagacaccagacagaaaggagaaggaaagaaaaggggttctatgcatcctgtgtcccccctccttgctcccacacacggcccaggaatgcagatcttaacggagcattgctccgggaaccagaatctgggttccaatttcagttctctgtgagctgctgtgtggctctgagcaggttgtatcccttctctgggcctcattatttgtgggtgtcagccaggacggcatagctgtccagctgtctcccgcatgctttaccaacccttttcagtatgccccagatgagggagtgctctggaagctactccctcccagcttccagctcagagtgtgtagcaaatgctgtagctgcctcccacatccttaaacacagcagcggcttttcttttcttccttcagggtccacctggcctacctggacccccagggcccccagggccccctggagctgtggttaacatcaaaggcgtaagttaggatggggttgggagaagctttcctggggaccctgcagtgagcaccagattggcctcagctggtgctaggtttcctgatgccttcacccctcatattctctttccacaggctgtttttccaatacctgcccggccacactgcaaaacaccagtaagtaactctcatgtcttcatgcagcaggctaagtaccagtgcctgttttaggaaacggatccatcttgccttgggcacttttccattcctgtatgtctactctctgatatcatctatctacatataggcccttaaagatctagaagtttctagataatagaccctggtaatgaaataccacacactggcttattttaacagtgagtcgtctattagtaaaacaaacatttggcctcaggggcggaagaagcataaaattgcaaaatagactccttcttaactaaaagaagtgaccggaactcgtggcctctgagctgggaactgggggttaaaatttgtaactactcagttccatcctcctcaaagattgagttacccaagaggcaagcgttatctctcccagttatcatgggaagacagctacccacagaagctctttggttagcccaaggtcacggagcatggggcagctgggaccacagctcagatctcctggtgaccaggaagcaggtgcaggcactgtgatccttgcccagcctccccctcccccaggcagttggcagtaccgtctgtaggattttgccagtatcatagggagacatttatttctgtgaggaaacacggggacaaggcatgagtcatggatctgtgcgcaatcattctctcattctttcagtaaatatttactgagctctccccagtgccaaggactcttgctaggccccggggggaacacaggaatgacctagacagacgtggtctctgctttctggagtttgcagatgatcatttcaaaatattctttgaagtgggcttatactgattcccgtgggaatgggaatgctgctggtcgctgatgcctctaactgatgcaggccggctggctgtgtattggcctaggcctatgtccaaatctgacctttgaggcgtccatgtgggcagcccacggtccaagcatgctagcctggaaggcagagcgcgggatcccccaggggacagggctgaagctccaagtgagcccaacagcagcaccaagggcgtgtttatccagataactgtagcgaggcatctgctgcaagtgcagcttctggagataccccaagaaaacactgcatctcctcatacaagggcagaggctgcctaggtcccactgtttcccagagctcaaggtccctcctctcaacacagagccccacctccttactacctcccacaaacaatcccaacacaccaagtatgagacagaagaccacaaactttagactgttgtgggaatgatactgcagttgtacaacctgtagtggaaccctgtgtggtatctacactcgggggatggtggggcagttatggagtgacttaaactcaatgccaggctcaacgtgttttgtcttgttttaatttcctgtggcatactgggacaccgtagcgtttggaggcatgggtgtttcctacgaggccctcaaagtagacattatcaaacagaaacacacccagcacttcgcaagcatcttccagtttcatcagtttaacatcatgacagtttatatactcctaccaccttgcttaaccacttgtaaaggtcgtccttagattttctttctggaaggttccttcctcttcccaatatcttttcatgatgacccctaagcagcttgcaatccccacttacaagcacagaaagatcccagatctaggtggagcatcttctggggaaagatggaggcagagtgagatggttacctttaattgtcaacatagaacaaatcaaattggccgagaaaagagtctcaataaggagttgtctagatcaggttggcctggaattatctagattacctaagccaagacaggaaaacctgcccactatactagacaccataccctaggcaagagattctaagctgcctaagagtggagaaagtgagctgacattcacgtgcatacattaattcattgctctctgctcttgactgtggatttaatgtgactaactgcttccatgcagtgctgccttgacttcacagcagtgatggactgtaacctggagttgtaaaccaaataaaccctttctcccacaagttgctttcgctagggtttccaatcacagtaacaaggaatgaagctaagacagttgaacagtgttatccagaactgcttggattccagacccctgtcacctaatgaagagtccataaaagcccctccaatctaatgacaaccctgctatttgtcactgccactgctgcctgacctgtgccttatgcctgtctctgattacactcagtagcaaagcagacgattggcccagcttcagaacttgctcagagctggcttggacacttggcctcacatgtgagccaatcctaattgataagaaaggaggccaagacactcagcattggctgcactcacgaatgcagtctggaagccttgtgtttcccttctgcttagatttttggccagaaatctcaatgctgtgtgctcgaggccagctacatcatgggtttcccaaatgaaggcctgagaagtctgtgttgagggtactgaggagtattccaaagccaaatagaagcctggccagtgtcatttcatcctctgcgatttgtccccaggacaaatgctggggcagggcttcccatgtctgactgggcctttctctctccccaggttggtaccgctcaccctggcgacccagagcttgtcactttccacggtacacactcttttcttcatggtttctcagggacattcctgacctagtgctggccatggatgaggtggtcaggaggggctaacggggcatgggggaggggtggcagctgagctgtgggacatacctctgtctgctttcctcatggacctggtgcatcccgggtagcgggaagcgctccctctgttcattcctttgctgatctgttcagaagacagtcatggacgcctgcttggtgctgtcccttgatgttcctgcctccttagtccttaaaatagttcaagtgacaggaaaactaattataggacaggaaggatgtctcagctgaagaaggcaaggcctgagtttctgcgttcaatccccagaacccacatccatcatcatcatcatcatcatcataaacaataactgggcttggtggacaacattgggggaatgacagccaagggcatcctctagtcttcacatacatttgcatgcatgggtattgcacctgtatatactcacacagacacatacacatacacgcatatacactcatacagagagagagagagagagagagagggagagagagagagagagagagagagctattccaagaaaacaccatgagtacttagaagacccttgcctagtgtgtccatggaaacgtctcagggaagcatgtttgaaaggcaggaccctaggccagagtgtagctctgtggcagagcactcccctagcatgtgtgagtccttaggtttggtccacagtgctgtgaggagagggcaaggcaagacacagtgatgcatagttataaccccactactcaagaggctgagccaagaggatcataagttcaatgtcagcatctgtcttacattaatccattggaacctgcctggtcctaacctcctggtagagcttgtgagaaacnnnnnnnnnnnnnnnnnnnnnnnnnnnnnnnnnnnnnnnnnnnnnnnnnnnnnnnnnnnnnnnnnnnnnnnnnnnnnnnnnnnnnnnnnnnnnctctctctctctctgagtgtgtgtgtgtgtgtgtgtgtgtgtgtgtgtgtgtgtgtgtgtgtgtgtgtatgtgtgtgtgtgtgtgtgtgtgtgtgtgaagaacacaccaaagagggacaggcctgtaatcctctttgacctccatactttgtcacacaatgtctggcttttggtcacagaattgaaatacagcataaataagggaaagtctttatctgcaatcccctgcagcttggctgtgtcacctggtgtccctaatggtgtcttctgtattttttgtcattttggtcgtcaaatccagatcatgttctgacttggtgcaaggcccctttctttttggtgctagggcaaacctaagttttatggggcgttgttgtcatttgagaagagatctttctatatagctcttggtagcctgaaactaacagagatccacctgcctctgccacttgacacctggaattaaaggcatgattgcctttggcttatttataattcatattatgacatatattataatttgtattagctgctggtggtaggccttgggtgggaaggggagctgggtttgctgtcatagatcttcgaggctcccctgggaggaggggcaggagcagaactttttggatgtgcttgtcctggtgagaggtgggattctataaacatgtctgagtgttactactgcatcttaggggaacacttatggttgccctactccctagcttctccttcacggatggctgcagcctcagttggaaccttcagtgctatgcatttagtctcagaagcttcccagcatcagtggaactgggacccatgtggttgtagttccctggtgctccctagtgggtgccatcacacctttggtgctcttggctcttcttctacattgagtaagcctgtgcttacaaaccttatgatactacctctagtctagagaacattggaagatttagctgctacactttttagggttcatgaattgagaggtctcacatccacctgtagctcctatcaaggggaaggaaagaggccttccctccctaaacactgcttgcctataagcctctgtcacatgtatctctcttttgaggagtagaaaacaatggctggtgtagcagtcttgctcctcagactcatggctgaggcacaagtgggtgttcattccatcagccagctgtgggaatggatgattcagcctccttagttgcactgtatcatcacccctgggaggtttatctgctcttcaagacaccaggctgcacagccccaggggacatgagactggagacctgagtgggattaggtctccgtctgcattcacaaactgtcccaagggagtgagaagccagctcctgcttggtcataacagccactgctaggctcaattcttaacctttctattctctgacaacactgcattgctgtgaactgagtcaagatctggagacctgtctgaggcagtgattatggtcttccgagtctctatctgttggcttctaaggggccttctagtctgatggattttgctcaagttgattttctgcaacctatttttcctttctcttaaatatttctgtgtgtttggtgacaggtgttaaaggagaaaaggggtcctggggtcttcctggctcaaaaggagaaaagggggaccaaggagctcaaggaccaccaggtatacctgcccctgttctaggcaatgccgagtcaggctaactacacaaccatcctgcccacgagcacagtggtctctggtgagaataagttacaggcctgacacatccaaagcagaacatcgtggagagagcaggggctagggttggatggctgaaggcagaacactgcctggtatgctcagaccctggcttccagccacagaaatacaggctggggaaggggtggagctgattttctatcattcatatgtaaaatatggcacaaagagaatgggggcttgcctgggatcctacagtccctgggtagtgggccttgtttaggtctggagatgcctccaagcctagagtcaaatctagtaaaccgatgcagtttcgcttttagtaagtgaaaaccatggtttctaacttggaaactctttgaaacctctgccattaagttggtaagcttacaaagcatttttttttctgcaggccctccagtcgatccagcttacctgagacattttctcaacagcttgaaggtgaatgttcattattaaacatggtctattatcctagtcaatttgttgttgctgtaactgaataccacagactgggcaacatggaaagaataatggtttctctggcacatggttctggaaatctagcaactatgcttgttagtattctgcagagttgcgaggctgtgcaggaatcatacagcaagacagagcaaatatgccagagggcctacttttatagcaaagctgctcccgagattacaatttactcctataacctatagacttcacctctcagtaccagcaacatacaagttcagggatgatgtttccaacacatggaatttgggcctcctgaatactactaaaactatagcagcctgtgcctcagtttcttgagtttctgtgagaaagagttcatgccaggcttactgcaaccttccatggtctcttccagggggagaatgaagatgcttcattcagaggagagtccagcaacaacctctttgtatcagggcctccaggcctaccaggatacccaggcctggttgtgagtagtgactccctgggaacctgtggcttttcctgtgccccacccccaacatgaataggtggttctggaatcaaagtcagtgttgtacatactggaggccagactttgagatgagcaggctctcctgtgtgtcgttgcttgctgggaggttagctcagcctcccaggctgggtggagtgagtgaacctcaggcaccagccatacatactgtggcaaggtcactctgtaaccagagctgtcaatagtgaggggttatcttagaggatgaagggaaagttctggtaatgtctttagaaggattcttgattcttctgatgtttgactgaaggctaagcctgtaaagattatctacaggtctggtctttatagatgggaggagggtcaggcagccatgagagaagatcaaggtttgccccacttttctaacctaacttggcttgaggcaagccctctccattctgaggactcagttcctccttgtgtggagtgagaaggccactctaaatctccagggccctctggatgcctaggcttgctggtatctttggactccaaacctgggctgatgcttgctggaactgacaccacctggcattactagattttcacaaacatgctaagaggagagatttctccataactatgtgcttgcctcaacagggacagaaaggagaggctgttgtggggcctcagggacccccaggaattccaggcctgcctgggccacctggctttgggagacctggtgttcctggaccaccaggaccccctgggccaccaggacctcctgccattctgggtgcaggttagtactgaatgatgtctcattcctgctgcctctgcctttgggctcagggtagcacattgggtgacatgtcagtctatttgtttgatagagggccggatggagcctcccatcttctttaaaatggatacagttcagatattataacatgcacctacttcaagtgtacaatccagtaatgttgaaggtactcacagtcatcttcgccagcacttgtggttacactggctcagtcctgatggctgtgaggtgctagctcactgtggtttctcagtttgcctagtgagtaattgtgttgggcatctttccacatattctagaaccttcctggctgttttgtcaatgccttaagaatttgtctggtctcatggaagaattttcttgattgaggttcccttctctcagatgactttaactgtcaggttgacacaaaactactcagcacagtggcctaaaggaccagtatgaatggtcactcttggtatggaattccattcaggcttcataacttctagagtaaaaaagtaaaaatgagttatgcaatcattgaacaataccaagtgccaggaagtatactgaccattttactacagtttcctgggaattcaagaaaactaagagcaaggcctggggaggtaactcaatacataaagagctccatatgccagcacgaggatccaagatccccagtacttgtgcaaaacattcagatgcggtacacacttataatcacagcgctagagagatagagacaggaagatccctgggtctcaatgtcagccagcttcaggccattgaaagaccctgtcttaaataaaaagaaaccaggaggcagctgagagaaactaacatctgaggttgtcctctggcttccacacaccctgggtatgtatgcatggcaagcacacacacacacacacagagagagagagagagagagagagagagagagagagagagagagagagagagaagaagaagaagaagaagaaggaggaggaggaggaggaggaggaggaggaggaggagagaagactagtaacttcattttatagctagttaatggcacccacagaatcaaagcccagatacccatatctctaaggcctatgcttttcttaatgttcactcagtggacattctgcagtgaacaataaaactgaacatccctagacccaaaaagctcaacgtttgaagcactctggtgcccaacaccttgtgagtactggtatggtgccacatgtggaaactctgtaccctgaaactgtttaatgtccaaaattattattgaaatcatcgatggcttggactttataccagtgaaaaggtgtttctccagcatatcagaagccctgaagtcaatccccagaaccataataaaattaataaatgaaatataaaatgatttttagtttatgattctgggcctatccccaagatatgtcatgcacatgtaaatattctaaaaacctaacaaacaaacaaacaaacaaacaaaacgaaactctgaaacccaccttcacatggtagcagctctaagcacgggtgtttcttgccaattgcattggcatgagctgggtgtggtggaacacatggtgggatcccacagagccttgtgtcgaggagagccttgcagagggtggccttggggttggctccaacatggccttggctctcctggctgaaagcagaaacaaggctcaaatcaggttgagagaaagggatgcttgccggctggaaggaggggctaagcaatcagtttgtgagatgagtagaccagcaactggaacccaagaacagcgtgaacctaagaatagaccatttaaggatgctctggccatccttcgcccctctctgtgtaccagcttcatgctagctcttcacagaccacactcactgcgcagaggggaagagggctgctgaaggcttagttcttccactgtgagctggaaatcaggggcttctttgtcaacattggtctgcaatgtcttgggataggacagttccaggacaacattctaattggcttgtctcgagctaggtgtcgactttggaccaatcatctctagtcaggaggtaggaccacttgggaacatggtagctcttactgtcaggaaatggttgtgggtgtgaagggaaagacctcaagagaaaaccacaaggactttgacaggcactgggtagataaaccagatgtggctacagggccttgttggataaataggcagtgcagacgatacaggggtttggcaggatgaacgcagaaggcagagaatctgttgttcacagaagcgcgtggctagaaccaaaatccaagtcttcccctgaccctgtacccacgggccacctaccacctatgtgtggacactcaagccctgtgttggaactgaagagttgttcaaagtagcctaaagaattaatggatccattttctaggatttacagggatatccttctacctgccaagagctctgcagattctggaggggatgggcttagagaggcagaagaaaaacaaaggggaaattccaagacttctgcgtttttccaaggcaggggcatttcaattgggccctccgcctcctcatattttctggggatcagtatggcagccttgagctgattttcagggatcctgagacagtacaggaactaagaagccctgggcaatttgcagtgtgcacacccagcctgaatttgcctggttctcaccagcctaccaatagagcattgtagtggcagggatgtctgctggtgtctcgcagacaacttttgaggtcctgcttctccagaagtgtgcagctggcaattagcagcctggtcttttcctgtccccaagaccagtgcttccaccaacctggtctcttcccacagcccagccctttctcttcctctttgacacccacttcctctaaatggtggtcacatgctttgtctcttgaaaaaaagttgtatgagtcagggtattttcaacgccgggacagaaaaattgactcaacctggctttttcaattaaccactaatgggtttcacttacagtcctgacaaataccaggcacaattcatccaggacaatagtgaagaatttcatctcttccccccaagccagtcagtctggttttaatatgcacggtggatagcccatagcatgcaatgaactgtgagcacccctctgggagtcagcagagacacacacacaggcacccataccacacactgtgctttgtatcacttctctctttttgtcttgtcccagctgtggctcttcctggcccacctggccctccaggacagccaggactccccggatccagaaacttggtcagtaccttgtatagtagcaactctacactggatagattcactggctactgtgtcttggtagtgggagggggaggaaagggagaggggagcgggagggaccaggctggaattccttttattttcaaattagaactctgccaggggctgagatgttcttcagttggtagactgttttcctaacatgcaggaggccctatgtttggtctctagcaccacatgaaaccaggcatggtggcacatacttcttgccttaacacttaggaggtggaggcaggaggatcaagaaattcaaagttgtcctcagaacataaaagttagagaccctatgtctaaataaataaagttccatgacaatagaaatgtgctgtttcaccaataatagatagacatttacttccttttcaggtgacttgttccataaagagctacagaaaacaaaatgactcgttgacgtagcctatgagcctttaattgactaaaactcaactgtggtctatttttaaaaacagcacacacacatatgtaaacagcatacacacacatatgtaaacagcacacacatgtgtaaacagcacacacatgtgtaaacagcatgcacacacatgtgtaaacagcatgcacaggtgctttgctggccacactcctcctgggttgttcagctagagcatggcccaggtgaattcactgtctcacagtgcagtgcaaggggtatggcttgcctgactgttagctatgctcagagagacagataaatgcccaccagacctacaaccaatccaagaccaaatgccagcagtcctaggaacctctttgctggttactgggtttcattcttaaaaagattgcctttcaaaagagaactgtccagcagacaagatttggctatttgggggatgggggtggggaattcctatgccattttgatgaatattattattgtcaagctgagataattttttcttttttcttttttaatatatttccctcagttacaatgagactttcggctggtagtttcttgagacttggtgctattcagaattttttttttgcagcttcagcttcctgaatctgctcctagatatgctaagtggctgccattcttattttaggcaactttttgagacagagatgccgcaagcccccgtttttttaaacacatatttaatattgcagccatccagctagactaaagactaagtgctaagtataattgcccacttgcttgcatttcttatcccaaatgaaaatgaatttgaaagtcactaaggcatgtgagctgacgccattagccagcgtagctgctgccgagctgtgtttaaaatcaacacaagtggcaaaagaaagcagcgtattgatgattttgctaaaaccaaaacccagcaaagacaactctgttgctacatctttatcttcacaggaaattatcatttgtgtttttattcattttttttataatttagatttgtggttcaaagcaatgcatgttttcatttcatggaagaactcccttagccaagcatgatagcatactcctaaagtcccaacactctggcagccgatgtagacggattatgagttcaaggcatgtcctggctacatagtgaaaacttgcctcaaagcctaggggctaaggagacagatcaggggataaagtgcctggcacacaggcatggaaatcccagtcagaccccagtatccactttaaaaaataaaaagctatgtgtagttgcacactatagttgtaactgtagtgctagaggagtgggaacagagccaagtgggtcaccagagctcactgcatccagtgtagccagtcggtcagtgctgggttccgtgagtgaccctgtctcaaaatggtaaggtcagagcaagtgataatggaagataccccatgtctaccctggcacctccctacacacacacactcaaactcacacacatactcactcacacacatacatatactcaaactcacactcatactcacatacatatacacacagcatgaatacacattcannnnnnnnnnnnnnnnnnnnnnnnnnnnnnnnnnnnnnnnnnnnnnnnnnnnnnnnnnnnnnnnnnnnnnnnnnnnnnnnnnnnnnnnnnnnnnnnnnnnnnnnnnnnnnnnnnnnnnnnnnnnnnnnnnnnnnnnntgtgcatcactcacacacatacatacactcaaactcacactcatactcacacattcatacacacagatacacacactcatactcacgctcacattcattcacacacatacacacactcaaactcacacacactgacacacacacacactcatactcacacattcatgcacacacgtacacacacattcatacacacctacacacactcacacatacacactcacacatacataggctcacaataaacacacacatacactcacatacatgcacacatacacacatactcactcacacacctacacatccagagagagagggagagagaacagccagggtctgatgatgtagctcagtggtagagcacttgcctagcgtgcacaggctctgggtctgcaccgaaacactaaaaccaaactttacttattagcaatgtccagctatttaagcatcatgccagggttacttgtacctcaatggactctggagaagagattgaatgcgtattcatgcttttaaagcatcattgtctgatgcaacagacctttttcttgagtgagggattatttatatagaagggtgggtgtatcacatttggccaccgtttgataacagtttggattttaaatgatctgacaggtcacagcgctcagcgacatgggtgacatgctacagaaagctcacttggtcatagaagggacattcatctacttgagagacagtggggagtttttcattcgtgtccgagatggttggaaaaagttacaggtaattcttaaccttccttacagccctctcccctccaaataccctccaacacaaagagcctccgccccaacagtgccagttcttacgagccctttcattggcatatcctccttctcttgcagttgggagaactgatccccattcctgctgatagccccccaccaccagcactttccagcaatgtgagtagctctcctgcccactccctgagcttcctgcccccttagagggccctgcaccaagctacctaagcctgttctgtgtgacttagtacttgggggaaactcagtaatttctaactaggacactgtcaccacagagtggagagagcctgacactggagacctctgttcccaatttacccacatcatgtagaagagtccctccttccctccctccctccttgcctcccttcctccttcacttacatattttgagacaagatctcactagtagttctggccagcctggattcacctgctgctgcctcctgaacgctagggttaaaggtgtgttgcccccacacctgccaggcaaacccttaacttttattcactgctataaatgagcataaacaattggcataatccgctgttggattttattgcaaccctttgaggccacaaccatcaccccatttttcagattccaaaactgaacctttgaagaggaagaaatgttggcttttaagcttcctcagcacagggatcttagagatcttgaggacacttcctcctttgctggtgactttttgtttggctgtaaaaggcctcccatgtaagggtcacagttaaaggcaatgtccagctatttaagcatcatgccagggttacttgtacctcaatggactctggagaagagattgaatgcgtattcatgctttaacctttacctttcatgtcacagccgtatcagccacaacctccactgaaccccattttaagtgccaactatgagaggcctgttgtaagtacaagtcatacatttcctttacagataatgagagtgtgcctgtaagtgctaagccctgtgttcggtatctagttttttattttgttttgtttatttcatgtatgagtggttttgcctacgtggttgtatgtgcaccatgtgtgtgtctctgatgcctgtggagatcagaagaggaaattatatgtcttctaactggaattataaacaactgtgaaccaccatgtgagtgctaggaatccagtcctagtcctttgctagagaagccagtgctcttaactgatcaataattcttaccacccaacggcttacaaactagccaggagggcacacacccaaaatagacagttgtatcacggtgtgctaagctattgagtgagaccaacccaagatggtggggttaccagaaagacaaaggaagtcactctgaaggaggtgaactctagattcagacctaaagaacactggagttcaggagtgagccaggcagggacaaacaaaagtaggaaatccaggcagagggaaagatggatcatgggagggtgggatgcgtgtgcacacgggtccttcctgtgctgcacttcaaactgaccagaggagtagacttcacagcaaaggtagacgattaggctgtagaagtgaacaagagccggagttagggagttttcccctttcctgcaggcgatgggagctgcccataagttgaaagctgagcaagggtatgtggtaagatggtgctttgaaatgacttcggtttgagtgtgtaagaggattggaaagggcagaagctggggtacaaagcagtaagctgcagaagagggctggtcagagagacacaaagggacaggagaagccagtttggttctggctgcgatgggaatgagtgagacagaggtgaccccaaattcccactggggtgatccagtggtcacaagctcccaaccaggcgtcatctgacatgaaggggttgcagactcagccctgctctatctctgctgtaaataaagatcacattcctgtcactccagggacttcatagaatttgatcactcgaagtacagtcagcctgggaactctcttttctgctctcagtcattttgctatttccatacacccccttgtataagactttctcttcctgtccctatctagcccttgcctctgcaggcatggtacacatgagcttgcacacagctcagggttgtcccagcactatctcatgccctaactcccttaccttgtggctgaaaagaccaatctgcctaagtcagttcagagtcttgggagaagcactccccatggtctatcttagatcaactactcatttccacaccaataaagaacagcccagagatagagtcaaaggcataaggccttcagagagcaaggcataagccacgccgcacagaaacgtgccttctgcagtgctgccgtgtccagagaagatctcaggttcagcagagcaagtctgaagtggtcccaggacattcaaataaaagtgggagtgagagagagagagcactagagatgtctgaaacccgcctggagaccttcagcagtgcagtgggcattgtaatgggaatggggagtcccaaaaagaagctgtacagagagaaccaaagagaggctgatgggagaaacccagaggcaaatgagaagctttgccctcctaagacaaagaaaaaaggccaaagtactcaggagtcaatggctgctggggggacaaaaatgactgaaaggcagatttataagagagagcaaagtgtttatgaaggcaaaatgattctaggaagctaaggagaaaattctcagggggagagagagagaggtaatttgggtaaacttttaatgagcccaagaagaagtcagtaaagtgaccaatggagttttaaagcaatgaattggtttttactttttaaatacatctatttgtgtgtgagatgcatgtgaatctctgtctctctctgtctctctctgtctctgtctctgtctctctctgtctctgtctctctctctgtctccctgtctctgtctctgtctctgtctctctgtctctctctgtgtgtgtgtgtgtgtgtgtgtgtgtaggagtgcatttggatgtcaatgccaacttgacaccccttagacacagctagagagtggcagaatgagagcatcctcagaccacagactgcacttcatatggaatgccaacagaaagggctggagggaggaaatgggtgcctatgtgcaagccaaaccaaattccctaatggctttggtttggggctgatgaacaaggtgttaggaatgggaggcaggacaaagccaccctagaagccacgcttgtgaccaggctgggagcatatccagatttctcaagcatggcctgcacactagaatcagatctccaaaggactcctcaatccgaggagaatgtctcatgcatcttttattaaatctaagaaagacattctcaccccaacgtctgttcacgggtgctaaggctgtcttcactgagggtggacagctgcacctgggtcacaccttacagtcgaagtgggcctcttcctcagaacaggaagaggagggtggggctgctaaccaccctgtcttactctttgcagctgcacctggttgctctgaacacaccggtggctggggacatccgagctgatttccagtgcttccagcaggccagggctgcaggcctcctgtccactttccgagcctttctgtcttcacacctgcaggatctctccacagtcgtgcggaaggcagagaggttcggccttccaattgtgaatctcaaggtaaagctgaacaccttcgccactgacgtcaggcacatcaatccccaagtggcccaagcacttgccacttcaatcactgtcctcgctgagctgaggactccagaagtagtagctgggtcacactatgaagagggagccaaaccctaaatgtgtcatttgtctttgtagggccaagtgctttttaacaattgggactcgatattttctggtgatggaggtcaattcaatacacacattccaatctactcctttgacggtcgggatgtgatgactgatccttcctggtaagtgcaggcttgggccctgtgacgtagcacaagaggcgtttctaggacatgttctaacaatgagctacctccctggaacactgccagtgtgaagccacagtaaggcagctgagtcacgggaaagccatggccttggagccagaagcctcgggtctagtagctcatgataagacctgggcaaagcacttcactccatgagccacagtggccttgcctgtcaaatgagtacagtcattggtacaccacaggacagttgtgcatatgactgtgggtgaaaacacagtgatactcagtgcctgtgctacaacacatctgaatgcaggtctgaaaggcacagtaggcccccacggccctacgctttaagggctcccggtgtcgaggggcaatagataagagactgtgtataaatgtggacagttttgtagttttaaaatagaaagctgataaaaggaacagaggggaggatttcatttttgagggcaagaatgaaaaggagattcctgaaagagggggcccctaagatgtgaaggagtcccaagtctgaccatgagagaggctacccaacaagtgagctcaggagcaatggtccagatgtgtgaaacctaaggatgccattgggagatcgctgcaagtgggtatggctgccaacatactctgtctagagtatgtctagaaagcaggtaacagccacaaggcacgggagaggacttggcattgaactgtgggtgaggaggaacatgtctctccctttgctacactaatgctaacttcctcaccaagatataccacaaagaactgctatttaggaactagggtgatggctcagcgggccaagggcttgcagcacaagcacggcaacctgagctcaggtctccatcacttatctcatagccaggtggggcagcacgcttcagccacgccagcactgannnnnnnnnnnnnnnnnnnnagactgtgtataaatgtggacagttttgtagttttaaaatagaaagctgataaaaggaacagaggggaggatttcatttttgagggcaagaatgaaaaggagagtcctgtaagagggggcccctaagatgtgaaggagtcccaagtctgaccatgagagaggctacccaacaagaatgagctcaggcaagccaggggccaccagccacgccagcatgagggcagaaattggtattggtggagtccaaattggcaatgttcagtgaagagatgccttgggagatcgctgcaagtgggttgccaacatactagagtataaaagcaggtaacagccacaaggcacgggagaggacttggcattgaactgtgggtgaggaggaacatgttgaactctgaaacacacacacacacacacacacacacacaaactgtaaaataaaataaaaagaaatgaagaacttcctgttattaaaaaaatgccatttaaaaagtaacactataaaattcctttctaggccccagaaggtggtctggcacggctccaacccccatggtgtccgtcttgtggacaagtactgtgaagcctggcgaaccacggacatggcagtaaccggatttgcctccccactgagcacagggaagattctggaccagaaagcttacagctgtgctaacaggctaatcgtgctgtgcatcgaaaacagtttcatgacagacactaggaagtgataaccttcccatgattcttaagagagtgttctaagatatttcttatgtgaagagttgacactgaagtctaaaatgttgtaaatattacaagtttggtttttatatatattacacatctgtcaaaagagaaaccaaagaaaacatacctcagtatactcaaaaggaaagacagaaaggactcagatccaagtcaaatccaatccacatattggtgctagattctgcaggaagacccccccgcgccccccacccccaccccccgcagtgtgaacacattccctgacacagagtaggacagtctgaaaacaggccagcatgattccccagtgcattcttcagaaagcgatttcttccttgcaaccatggctgttgagtgtaaaatgtgctttgtgtttgcttacaacatcagcttttagacacacaggcccttcctaagtcacgagtgatccaggcgcttggtgactccacgcacgcgcacacagccagggaaagggatccgctcagacgatcccgctcatgtttcctccggctttggtgtggtccccactaaaatagtattgccatcatgctgtagagttctgcgtgtttacccagtcatagctgagcgtggcatctgttgatgtaattctgacttgctgggaagttaaaactctaggagagaaacagcacagaatccttccctccccctctctactgtcccttcccattcccccgccccggtcttatgatttccatttggcaagccttgaattacgactgcagctgaaacagattggctgagaggaattttctgaaaagaaaaaaatctctgtatcattgtgctatagactttgatatctttttccatgtaagaacataaagacatcttttccaggtgctttctcctgtttacgtctttccccctgggtccttcattccttggcactgtggcagaagagggctgggtgtgtgtgctaatattgtcactagcactggagacaagaggggtcggggtgaggtagggatgactctgagtgggaggcaagctctgctgtggttgcctcagggtctcagtgcatggctttgggctcttctgtctctctcaaggagaacgggatagacacactcagtgaacaggatagacacactctcagtgaacaggatagacactctcagtgaacgggatagactcagtgaacgggatagacacactctcagtgaacgggatagacacactcagtgaacgggatagacacactcagtgaacgggatagacacactcagtgaacgggatagacacactctcagtgaacaggatagacactctcagtgaacgggatagacacactcagtgaacgggatagacacactctcagtgaatgggatagacacactcagtgaacgggatagacacactcagtgaacgggatagacacactcagtgaacaggatagacacactcagtatctgcttcactcagtaaaagtttatcatcggtaaacgaggtccccagctctgcaaagtgggtacattctaaacctctactttacaaatgaagaaaaaatgcaagtggaggctcggctccttcctgggtccagtcatgtggctggcacgtgcagggctggcttcaggctcaggcccaaagtcctctcaaggcaccactggatatggatgcctgttggttccatctccactccaagtgcatgattctggaaacatcatcagtaggcaagaagcatgctgagctatttcttcccattcagtggggactggcccagaaagtcatcggagtgactgcatcctcctaagtccttgaagtaggaaggaaattcagaacaaaaccaaaacaatataaaacaaaacaacccagaccgtccacttcaaaatccacagcaggaagagcatagaatctttctaatgagtcagaaacagaaatggctacaggggaaagtcccagtggtagatggctggggacagatccagtgctaagttacaggtggggagttcttggcatgggcacagtggcacgaggaagaggacaggagggtgctgagtcaggaagtatagatgtcacccacaccagtcagagcccaccagaacagagaccatagaaaggacacggtggagcagagctgagggaagccaggaagagagatgcccacttctcctgaccctaggagagggtggtgagactttccccctctgcatgccctggaggacctacgttcacagacaagagtcaactacagctacgtgcactctgaccaatcattccaatcctgtgcttggcattcaagagacttcactgagtgtttgccttgctaatctttcctgtcccatgccaaaatctacctgtctggtctttcacagggtctcttaggcaaaccacatagactcttctgatgggccacgtcatgtcctgtaccatcttagcaaagccttaatcattgtctcttccttcccacaacactgctgtgacatcccctaggctgacatacctggtgtcatacccctctcactggctacctggcatacttcacacctgaaatataacactcagctagctaaaacatagtggctgaagggtctccaagccttcactacgcattggcctggacgacttgggggtactagaaggctgttaagccaaccctcacccaggccaaacacaggaaggaatatgtaggtatgtatggctataacctctataagctggagggctttgagggtgctctgtgtctgtatcaaagaccttcaggtcttaagcttgtggcttcaaccttcctggatcttccatccagcaatataaccagagcaagagaaacggctgccaacccacgtaggagagggggccgatcttatgaggacaacagcttgggaagaacagaatagcaaatgagcggagcagctcagggggtgggaaggtaggggtggggatggcggtgggagggtgtgcgggtatgggtggggatgtggggtggtggtggtggtggggaagagtctggtgtgactccatgatatggcctgaaacagacctggtaagatgaaaaaactgggtcacaggaactaccctcaggtctccagtgtcctctggatcccttggctgagggctgtcatctgtacgtgaacaggatagaagcagaattgtgggaactgtcaacagcctagtatcgtggctgagtattagttaaggttcagaaaaataaagagtaaaaataaaaagaggaatgagtttgttcatgagaacaagaagtgggacaggagtacagacttaatgtggtaatgtcacacttgggttaaggtcatcttcccatctggctgtctggctggcaggctgacttctgcttttctctgtgtatgtctccttcctttcaaccaaagacaagctgccttcgtgggtcagggtgcagacagcttcagacctgcattgctctctgttaaccaagagctcacacccacagagggaaggggaggcttcctctccccatgggggttacgtcagttcctaaaaatgaccaccactggcctcacttgagttgtgtgtccagtgtccagggctgtgatgggcagcctcaccagagaggagacttgcaggagaaaacaaaacttcctccatccaaaatgcctaaggtctctgaaatgaccagaacactgaaaagattaaaacacagattcatcctggccagcaagagggatgggatggtgtgggcaggcaggcagaagtgagctcacgtcagcttggagttctacagtaaagcatctaaactttatcttacaatgaatgggcaggcacatcgggaagatctgaagcgctggatgggattggctctgggttggttagtttgctcattcactcagaagtctctgggatactcatcttttttctcctgatcatgtttcattgtggagacacaaacataaataaatggtggctcctttttcaagtccaccaaccccttccatttttttttaaatcatttttaagtttcctttctccaactcctttcatgaccccttccaattcctggcctcctcctctttaactgttatcctgtgcataaatatataaatacaacctgaccaagacaactctaaatgccacagactgttctgaattccatgcacatccctcggcactcaggaactctccagtcaagacaaatgcattgtcccagtctcccttaacctagtagcaagagagagacttttccagctgcttctgagctctgagtcaccaggaaagcactgagtctcttcaaagccttttctagccagtaataggtttccctgtcttgacttctgtcgggtcctctaattcgtgtggcagtcaaatgctggagagttctttgcctctgaattttggctctgccgcttgctgtccacgtcatcactggcgagttttccaagtcaagctgagcatcatccctgcatttaatccttccctgcaactaactcagtgttttcctttgacaaatagggaatcactgaaagtgctcctcattggatgagcttacttgtagtgttggaagtgatgttttagcacttcggtgtgcctgccattcttcgcctggccaggtgtaaccaggaggagccgagctttcttccccatgctgtgctagatgctatctcccaatccacatagcttttccagccatcttcaagcccaggactgattccccatgtcctccctggtacaaccctgactgttgctagtgagtatccgctttccccacatactctggctgccctgctttccactcctttttccaaactctggcaactaaaatgctttttatcatcttacttagtaagagctcagtcctgagactaggggtagatccctttgggttagcagggacacagtgtgaagtagacttcctatctcctgcatgagcctggccagtgtgccgagttctaaaaaggacccagaactctggtataaagaaacttcttttttcttcttttaggcttgctctccctctcagtgaatgacacaaccatctaacagggcctgaatggctgattatttagtcattcactcaagaaatatttgtgttatttttacgtggtgcaaaaacaattgtatatacatttgatgtgtttgtagtgtgtgtgacatgagtagagcgagggtcagatcagggtgatgacattcacatctcctcagacactcactatctctttgtgttgcaaatgttcacacttctctttgctagctatttcgttcagcaattattgattgactgtcccatcagcagttataacatccagaaacactaagtgtttggaacttcaatgttatttatggcttaagtccaaaaagttcccccacaggctcaagatctaaatgcttggtccccagcctgtggcactgtttttgaaggttgtggaacctttaggaggtggggcctggctggctgaaggaggtcactggagggttggcctttgaaggttatgtctgcccatgagccatgtgaacagcctctgcctcaagctcctgctgccacagatggagcgtttctaaccaccatgcttctataccaccatgggctgaaacttctctctaagagtgtgagtcaaaataagggaacggaagacagatgttccctttcagcaacaaggagaatgacatggacagtgtgtagcaacttaagtgaccgccatctggactttttaaaaagatttatttaatttttggttctttatatgtgcatttatctctctgtgtttgggtgtagggcaagcgggtcatgccaccagacaggagaactgataaggctgagtgaactcagaccccgggaatctcagagacttgagatcagcaggagtcaattccctccttatctatttctgttcctgctctggaacacataactccaataccccactgaaaggaccatggcaatcagtcatagagcgtaaacacctagagttctccatgctaataaggttatctaaactccgccccgccccgccccctgctccacccccgccctagagttcagtcaatgagcttcccttcctgggcattccttcgtgcaaaaggtatttaatccctgttcaccctgagtaaaatgtatgcattcacattcatcatctaataaagcagtttaatcaagcaagggccgtctcttcatcaaggatctatatgggaaggccttcatcttaaagagtcacacctaaatctacccggaaggccttctcctctagcccctctgcgctcatcgggaatcagactggttctgcactcttgtcccaggctctgtcttccctttcctgctcaatatgtgaatgccctaagagaagtgtggactgaggacaccagctcctgactcccagaggttggcccggggaacacaggcgaccaggaaccacagcattcatcccagcccccactgtttctccttccagtcctgccaaggaaaccatggaatgtgggcctcctgtttcggacttccttctcccagtggtatgccagcaacattctgggcaccccagggcacagttagacatatgggcatgtgtatgcaaacatccacaaaggccagaagagtgttggatgtcccaagctgtaattacaggcagttaagatcttcccaatgtgggttctgggatgtaaactctagccctctgaaaaagctgcaagcattcttaagcctatagccatttctccagtccctcttgttgacttttaagtgtttaaagtaccaggaatagtgcttccccaaaccatttatggaactagacaggggaagaagggcagggcatgaagtacagccagctagtaagtacagtggtagctggctcccagtgtcctctcaggagctctgggacctgtcttctggaacctcagattttccaccagagtaagggcgctgtggtatttatatatttgtggattcggttttaaatgactgcagccatcttgagtcatagccaccatggttgcccctagtaattctagtcggattattcctgcatagctttccagcaaacgataatgaatggctccacaccaaccatatatggagctttacaacagaactattcatgtttccagagatattcctgactcttccacagatctgaagaaaacccaggcacatcccatttcaccctggatgaagtcaacttaatcctcacccaccaatctacactctttctgacccagattttgaggacccagctgatcgtgctgcctgcgaggaccacattttcatcattgacataatggttaatcaactgtcctcttcgatcctccagctgtttgcctcttctccctcagtctcagcacactgggaccagtcttagaacaccagggctaagctattccagaagcacagaccaattctaataggttcctgaaaagtgggtgggcaggggtggagttagggcaccatgtcgaactccagctggccgcccataagcagactgggctctgaaggacagagcaggctctcagggcaagaagcgccattacaggaatggagaggcctatgcgtgctgcatgagggctgcactgtatcatgtgcagtttgacaggaaaccactcaggtttgatttcaagataacaacttgagcttataacaacttcttagaacctcattgagatgagaagaccgaagcggagaaagggatggtggagggggaagaacgggaagatgtggtagaggaggaagtagtgaaggaagaagaaaaggaggagggggaggagggggaggaggaggnnnnnnnnnnnnnnnnnnnnggggaggaggaggaggagcaagggaggaggaagatgtggtaaggagtagatggaagaggaagaaaaggaggaggagggggaggagggggaggaggaagaggccatctgcaagtcactggtagaaagggaagcacctcatgagccagaactgtgactgatcactgggaagcatgaacctggtacggctggatagctgataaccacagcaaagaccaggcctgggccccacttgttctccgactgctggtccgtgcaagcaggggattgctgaggaagaggtgggggctcacagacatctgtaccacaggccacagcctcagcagatctgctgatgctctatctctagactttcatgttcatgaacagcagcggcagcaatcatgtcactcacctgaggcgtcctggtggctcccaagcgggaacgagcacatgggttagaaccaatggcttctatttaaaaaggatgcgtataacaaaaaaggagacaacttggtaaattcagatttgtaattctcagtgaaattttagaggataataaattagataaatttgggaggatcagcaacagtccttggagataaaataaggtaccactgaggtggctcaatgaggaaaactgtggctgagctggcctggtgacctgagcttcatctccagctccatggtagaaggaaagaaccaactgtagaaagttgtcctctgacctacacacacacacacacacacacacacacagataaagagatacacacatacatacatgcaagcacatacatacacagaacaagcatacacacagagacacacatgtagacacagacacatgcacaggcacacacatagatgtatgcattcacatacatacatggagcatgcacacacagaaacagaaacacacagaaacacatgtagacacagacacacagacacagactacatgcacacagataaatacacatgcatacatggaaatgcgcatacacacacggaggtggggcatggatttcaaaattgcaatatctaggtactcaacctgtggaaaaatcttttgaaaaattataaccaaatgaaaatcgatagagaattgagatctcacacagtagagagcaaggaaccataatagaaatctaatgagaagaaagtcacactataaattctagctatgttccaactggtggtttctaatgtgtaatatgcgtatgccatctgaattaaggtggcatttactttattattctgacatgttaaaaaaaaaggtgtctgtagatatccaactcataatttcacatttattttcatttaatatgaaactaaaatgaatccatgaaaaagttatagcgtgtttgttgatcttaggcaactaatggcacaggccgttatgatgttagggtgtgtggtatgaggctccatgttgttagaatgtatgtggttagggtctatattgttgccatggtaaatgtgcttctgcttcttgacatggaaaacatgccagcaaggatgtcttgaggtggtattctagcagcaggagttaagtagaaccacgtatcacaatggtggctgcagctggactaaggggcaaaggctaacatgggcagagtttactacaacctctcagcaggccacgcccagccttgtcatcagggctccaggcaccattttgttctgtccagtaattcctcctgatctatgggtgttgttttctgtgatttccattatccatggtcacccaccattcagaaatattaaatagaaaatggcagtttaaagaattcataagttttacactgtgcatcattcttcacaccatagctatcctccttgggctggttgcttttaacagtcaacttaagacattctaggatcactggagaattgtattggtgaggaactgtctagaccagattggtgtgttgtagttgtatctgtgggaacttctatcttnnnnnnnnnnnnnnnnnnnnnnnnnnnnnnnnnnnnnnnnnnnnnnnnnnnnnnnnnnnnnnnnnnnnnnnnnnnnnnnnnnnnnnnnnnnnnnnnnnnnnnnnnnnnnnnnctttctctctctctctctttctttctttctttctttctttctttctttctttctttctttctttcttccttccttccttcctcctgtatgtatgtattatatatatgtgtgtgtgtgtatatgtatttcatatgtatgtatatatatcttagatatccatctctatatctatctctaatgtgtattaattgtcttgcctgtatatatatgtgtgtactatg

SEQ ID NO: 721 - DNA, 4049 bp, Mus musculus
caggaggaccgcgcagggccggcgcccgaggtggctgctctccatcatctccgcgctgctctccgctgtcctgcagacccgcgctgcgacagggtcagcctctcaggttcacctggacctcacagtgctcattggtgtcccattaccctcgtctgtgtcctttaccaccggctatggcggtttcccggcttacagctttgggcctggtgccaacgttggccgcccagccaggaccctcatcccaccgaccttcttcagggatttcgccattggtgtggcggtgaagcccaatagcgcccaagggggcgtgctcttcgctattaccgatgctttccagaaagtcatctacctgggcctgcggctttcaagtgtggaggatgggcgccagcgggttatcctctactacacggaaccaggctcccacgtgtcccgtgaagctgcggttttctccgtgcccgtgatgaccaacaggtggaatcgttttgctgtgaccgtccagggcgaagaagttgctcttttcatggactgtgaggaacagagccaagtccgtttccagcgatcgtcctggcctttgacctttgagcccagtgccgggatctttgtgggcaatgctggagctatggggctggagagatttacgggttccatacaacagcttaccatctattcagaccccaggacccctgaggagctgtgtgaagcacaagagtcctcggcgtctggagaagccagtgggtttcaggagatggatgaagtcgctgaaatcatggaagctgtcacctacacacaagccccgtaaatttcatttctctcttcagcctaaagaatcacacgttgatcccataagcgtgccccctacttcatcctctcctgccgaggactcggagctttctgggtctggtgagatcctgaatgatacgctggaggtccatgcgatggatggggaccctggtactgatgatggttcaggggatggagccttgttgaacgtcactgatggtcaggggttatcagcaacagcaactggggaggccagtgtgcctgtcaccactgtcctggaagcagagaatggcagtatgcccactgggagccccaccctggccatgtttacccagagcatcagggaagtggacactccggatccagaaaatctaacaacaacagcatcaggggatggtgaggtgcccaccagcactgatggggacacagaggctgacagctcgcccactggagggccaaccctgaagccaagagaagaggccactctgggttcacacggtgaggaatggttaaccccagctgtgtccaaaatgcccctcaaggcttttgaggaggaggaagccagtgggactgccatcgacagcctggatgtcatcttcacacccacggtggtccttgagcaagtcagcaggagacctacagacatccaagccactttcacgcccacagtggtccttgaagaaaccagcggggcccctacagacacccaggacgctctcacacccacagtggcccctgagcaaatgttcactgctgaacccacagatggaggagacttggtggcgtctacagaggaagctgaagaggagggatctggtagcatgccccccagtgggcccccactccccacacccacagtgactcccaagaggcaggtcaccctggtaggagtggaagccgaggggtcaggccctgttgggggcttggatgagggctcaggctctggagacatcgtgggcaatgaggatctgctgagaggtccgccgggtcctccaggcccaccgggatcacctgggatcccagggaaaccaggaactgatgttttcatgggacccccggggtctcctggggaggatggagctcctggtgagccaggaccccagggccccgagggacagcctggacttgatggagcctctggccagcaaggaatgaaaggagagaagggagcaagagggcctaatggttcggctggcgagaagggtgaccctggaaaccgaggcttaccaggtcccccagggaagaatggagaagttggcacccctggggtcatgggaccaccagggcctcctggaccccctgggcctccaggcccgggatgtaccacagaacttggatttgagattgaaggctctggggacgtccggctgctgagtaaacccacaatctcaggacccacctctccaagtggtcccaaaggagaaaaaggagagcaaggagccaagggtgaacgaggagcggacggaaccagcactatggggccgcctgggcccaggggcccgcctgggcatgtcgaggtcctgtccagttctttgatcaacatcaccaatggatccatgaatttctcagacattcctgagctcatgggacctccggggccagatggtgtacccgggctgccaggatttccaggccccagaggaccaaaaggtgacaccggtgtgcctggattcccagggctaaaaggagaacagggtgagaagggagagcctggagccatcttgactggggacgtccctctggaaatgatgaaggggagaaagggtgaacctggaatccatggtgcaccgggacccatgggacccaaaggaccaccaggacacaaaggagagtttggcctcccaggacgacctggtcgcccaggactgaatggcctcaagggtgccaaaggagatcgaggggtcacgctgcctggtccacctggcctacctggacccccagggcccccagggccccctggagctgtggttaacatcaaaggcgctgtttttccaatacctgcccggccacactgcaaaacaccagttggtaccgctcaccctggcgacccagagcttgtcactttccacggtgttaaaggagaaaaggggtcctggggtcttcctggctcaaaaggagaaaagggggaccaaggagctcaaggaccaccaggccctccagtcgatccagcttacctgagacattttctcaacagcttgaagggggagaatgaagatgcttcattcagaggagagtccagcaacaacctctttgtatcagggcctccaggcctaccaggatacccaggcctggttggacagaaaggagaggctgttgtggggcctcagggacccccaggaattccaggcctgcctgggccacctggctttgggagacctggtgttcctggaccaccaggaccccctgggccaccaggacctcctgccattctgggtgcagctgtggctcttcctggcccacctggccctccaggacagccaggactccccggatccagaaacttggtcacagcgctcagcgacatgggtgacatgctacagaaagctcacttggtcatagaagggacattcatctacttgagagacagtggggagtttttcattcgtgtccgagatggttggaaaaagttacagttgggagaactgatccccattcctgctgatagccccccaccaccagcactttccagcaatccgtatcagccacaacctccactgaaccccattttaagtgccaactatgagaggcctgttctgcacctggttgctctgaacacaccggtggctggggacatccgagctgatttccagtgcttccagcaggccagggctgcaggcctcctgtccactttccgagcctttctgtcttcacacctgcaggatctctccacagtcgtgcggaaggcagagaggttcggccttccaattgtgaatctcaagggccaagtgctttttaacaattgggactcgatattttctggtgatggaggtcaattcaatacacacattccaatctactcctttgacggtcgggatgtgatgactgatccttcctggccccagaaggtggtctggcacggctccaacccccatggtgtccgtcttgtggacaagtactgtgaagcctggcgaaccacggacatggcagtaaccggatttgcctccccactgagcacagggaagattctggaccagaaagcttacagctgtgctaacaggctaatcgtgctgtgcatcgaaaacagtttcatgacagacactaggaagtga

SEQ ID NO: 722 - protein, 1147 aa, Mus musculus
PLSPVPGSLWAMLELWGWRDLRVPYNSLPSIQTPGPLRSCVKHKSPRRLEKPVGFRRWMKSLKSWKLSPTHKPRKFHFSLQPKESHVDPISVPPTSSSPAEDSELSGSGEILNDTLEVHAMDGDPGTDDGSGDGALLNVTDGQGLSATATGEASVPVTTVLEAENGSMPTGSPTLAMFTQSIREVDTPDPENLTTTASGDGEVPTSTDGDTEADSSPTGGPTLKPREEATLGSHGEEWLTPAVSKMPLKAFEEEEASGTAIDSLDVIFTPTVVLEQVSRRPTDIQATFTPTVVLEETSGAPTDTQDALTPTVAPEQMFTAEPTDGGDLVASTEEAEEEGSGSMPPSGPPLPTPTVTPKRQVTLVGVEAEGSGPVGGLDEGSGSGDIVGNEDLLRGPPGPPGPPGSPGIPGKPGTDVFMGPPGSPGEDGAPGEPGPQGPEGQPGLDGASGQQGMKGEKGRPNGSAGEKGDPGNRGLPGPPGKNGEVGTPGVMGPPGPPGPPGPPGPGCTTELGFEIEGSGDVRLLSKPTISGPTSPSGPKGEKGEQGAKGERGADGTSTMGPPGPRGPPGHVEVLSSSLINITNGSMNFSDIPELMGPPGPDGVPGLPGFPGPRGPKGDTGVPGFPGLKGEQGEKGEPGAILTGDVPLEMMKGRKGEPGIHGAPGPMGPKGPPGHKGEFGLPGRPGRPQGLKGAKGDRGVTLPGPPGLPGPPGPPGPPGAVVNIKGAVFPIPARPHCKTPVGTAHPGDPELVTFHGVKGEKGSWGLPGSKGEKGDQGAQGPPGPPVDPAYLRHFLNSLKGENEDASFRGESSNNLFVSGPPGLPGYPGLVGQKGEAVVGPQGPPGIPGLPGPPGFGRPGVPGPPGPPGPPGPPAILGAAVPGPPGPPGQPGLPGSRNLVTALSDMGDMLQKAHLVIEGTFIYLRDSGEFFIRVRDGWKKLQLGELIPIPADSPPPPALSSNPYQPQPPLNPILSANYERPVLHLVNTPVAGDIRADFQCFQQARAAGLLSTFRAFLSSHLQDLSTVVRKAERFGLPIVNLKGQVLFNNWDSIFSGDGGQFNTHIPIYSFDGRDVMTDPSWPQKVVWHGSNPHGVRLVDKYCEAWRTTDMAVTGFDLSTGKILDQKAYSCANRLIVLCIENSFMTDTRK

SEQ ID NO: 723 - DNA, 150201 bp, Homo sapiens
cttcagagagcagagccctgaaagaaccacggccctcagcaatgcacgattgtttgtctctctttggccatctggttgtgggagacagagcaagtcagatttagctcgttagaagtcactggggctttcactttagccctgagatttttttaggtcaggtagtgtgcgtgagagcagacaaacgattcctatggtgagtttcattccatatatttccaccctctcgggctgatgaagagttttgaaatcatcacaccctagtatgggttgtggcctatttgtgcatcatgaaatctattgaacgggttttgatcagcctttttaaaaaaaatataacggagcacaacagagtagaaaatatctgaatgcgttacatgtagtatgggcaaatattgctacatgaaacctttgtttcagaagtgtgtttttgagattgtgagaccaagggtctcagttaagaaagattaagagccacaatctggtagcatttctcagtggagcacagttggtatttttgctgggctagttctctgttaggtagcctgcctcttacattgcagaatttagcatccttggcctgccaaatgccactaacatctgcattcattgtgacaaaagaaactccccatacccttatatttccaagtgccccctaggaatgctactgacctgtggcaaactcttgagtctctaggcttgagggaagaggaagccacaacctgtggcagctccgagtgaccacacttcacagtcatgtccagcagagctgtttctaacagttgatgggcaggaggcagtgaggcagataaaggggaacagagaaagtctgtattttttgtcagctgtaccactggccactctcaagagtaaggtgtggccctgccatttgggaacatgaagacttaatctgtgatgaaactcctatcagggccgggtgcggtggctcatgtctgttatcccagcactttgggaggtcaagataggtggatggcttgagcccaggagtttgagatcaacctgggcaacataaggaggctccatctctacaagaaaatctaaaaattagctgggcatggtggtgtgttcctgtagtcccagctacttgggaggctgaggtgggaggattgcttaagccccagccgttgaggctttagtgagctgtgatcaccccactgcactccaacctgggtgacagagtaagaccttgtctcagaaagaaaaaaaaaaaagccaaaaaaactatctctttggacagattttatgtcctgccgtctctggcttatctcaaggacacatttatcaaccctcatcctccttgagacaaaaatagcagttaaatgtagtgctttttacatttgccccatccttctttacagatactgtggaagcggcagtcattgtctggtgcactgatgagggagctggggtagaatggaaggcaagcagcccaaacgtgtggcgttttgcccacaaactctttgacaggcctccttgtgtggtcaaatggtacctagaagattccttagttgtcttatttctttaaattaaataaatttgtacagcagagcctctggttggattgggcttgggatcaggtacaaggtcccttctagctcttggctgctttctttccgaaatcttggatcctaaaggccttaactcaacagaatacatttttttcttgcttttccaagggtgtggcaaatgggaaaatccatctaagagaggtcttggcagtttgtctgagctaaaaagttcaaatgcatcatcgtaggagacagtattaaatactccaaacaggctgggcgcggtggctcacgcctgtaatcccagcactttgtgaggctgaggcgggcggatcacctgaggtcgggagttccagaccagactgaccaacctggagaaatcccgtctctactaaaaatacaaaattagccaggcgtggtggtgcatgcctgtaatcccagctacttgggaggctgaggcaggagaattgcttgaacccgggaggcggaggttgcagtgagccaagatcgtgccattgcactctagcctgggcaacaagagcaaaactcctcaaaacaaaacaaaacaaaactccaaacagagcattagacttatgatgtctcaaacgttctggggctacccccacgctggaatactatttctacctaatgcaagaaattccaagatagaattcaggaaccaggtgccatgagaaatagaagtgtgaaactttaggtcaatggcagtgaagctgtagcgtgcataagaaagaccagggagcttcttaaaattgcaattctcgagcccgcacctatagacattctgatttgataggttttgtgtagagactagaaatctgtacttttaacatgctttccacaaaatgattctgatgcaggcgggccacaggtaaaaaacaccagtctgaaccgtggctgaccaatgttgtttggtggagtgacaccctctagggcagtgcttagcagagcatgcagagacttgaagacacatgataaacatggatatgcatttccagttgtccttcttatttgtagtggtcttgaccccgaatgcctggggaaactgagcaggaggcccaaaaggcatagaaaagagcattggataggagtcaggacatttggctctggctttgccctggattgacagtggccctgggcaatccccttcttctctctgggcatgagtggaagctaggcttgaagatctctgagcacgcttttagatctgatattcttatattctttttttttttttttcaacctccgcctcccagattcaagcgattctcatgcctcagcctcctgagtagctgggattacaggcacacaccaccatgcctggctaatttttgtattttgtaatagagatggggtttcaccatgttggccaggctggtcgaactcctgacctcaagtgatctgcccaccttgacctcccaaagtgctgggattacaggtgtaagccaacgcgcctggcctagatctgatattctatgactgtatatctgggccttttatttgtattagacagatatttgtattatttaatgctaataaacattattatttattattatttaatttattattatttaataaatttattattttattattaattaaaaataattggcctcttattaaaaataaatggcctctattatttaaaataataataaaataataaaattattattaaataataataaaataataaatttattattaaataataataaaattaaaaaatgtttagtgacatgttaaatgccagagtcatttaatttcacacattcaacaattttctatcgttattactattttttaattcatgaaacttgaggcacagagactgagccatttgctgtgttgcccaggctggttctgaactcctgggctcaagtgatcctcccatctcggcctcccatcacttattttctttttttctttttctttcttttttttttttttttgagatggagtcttgctctatcgcccaggagggagtgcagtggtgcgatctaggctcactgcaagctccgcctcctggattcacgtcattctcctgcctcagcctcccgagtagctgggactacaggcgcccgccaccactccaggctaatttttttgtatttttagtagagacggggtttcaccgtgttagccaggatggtcttgatctcctgacctcgtgatctgcccgcctcgtcctcccaaagtgctgagattataggcgtgagccaccgcacccggccccatcacttattttctaagaagaggggtacagctccagctggtaaagaacagtctctggatttaaacccctgttgtctgattttggatactttatattgctcatttgtcagatgttggatggggacttctttgtcccttgggaatggcctctatctccccctattctgtggtttttggaagcccacagccattttcaatatttaagcacattcccagaaagcttatcttcttatgttcacctctgatgctgagctcttgtttctaagttctggttataactcatcacagcatcccatgtgtgcaaactttgttctgttctattgaccaagacgttgtattaatgtctcagttgatatccacaaaagtccatttttataaagcattcgtgtgtcgggcaaacttgagtgaaggctgttgtggttgctgggggaagggtcattgcaggagggctttccatttgctggaatgcaaacagctgcaaaccaagcattagacttaggattttgcaaatgttctgggggcacccccatgctggaaatatttcactggctgcttcatcacacagaacttctggcctcacactatcttgatggtgcttatcagctcttgccactctgcctttagctgggtttcccaaaatgcagagcctgaggcaaagacttctgtgccaatttatgaagttcagttccaggaaagagggagggggaaaagaagcagggaagaagtaagagcaaataacaggtcttatatatagatgagtcctcagtcttgtgggacgtttttttgagaagctgctgctcagggtggctgatgtgtgatagggagggagaaatagtcatccactggtttccatctctcattgttcagaagctggccacatattatttccttcgcatttccaagttgcttatgtgtgggcactaaatgaaccctacagcatctcatgtctcaggattaatatagaagtccctaagtatgaggtgagagttatacactttgtgcaaaaatgaaggcactgccagttttacccgtaattgattggagtccctggtgagttgatctctgcagcaatggctgtggctggaatgaatgaccacttggaggcaggaaattcagagaatttgaaatggtgcattagagatgtgtggcgtagtttactccctgcactgcttaggtttgccttcccaatagatctagctcctatgctatcatataggaccttcaattttgaaagaatatgatgttctcacttattttctttgtgtgtgtgtggtggggaggagttgggggcagggtcttgccatgttgcccaggctggttttgaactcctgggctcaagtgatcccatcttggcctcctatcacttattttctaagaagaggggtacgagtccagtcagtcacagaatccctttcaagatcataaccaactgagatctctgagaagattttagccaggagagtgaaacaagccaaagtcccctcagctgtagctagtgccatatccctcctcccccacccagtctgatttcctttattctcagtccatactttggatgatctggcttgctagcctagtgaggtgacctagacctttatcctttaagggtctgacctctcagctgccttgattgcttcatgtgcccatttgctatcattacaggatatgcatgtaccaagaaatacaccaggacattccctggattgtaaatatatcttctctgccccataaagtagctgctactgtggctcccggtggccatcagggctcaatagccccacttatgcagtcactctttttttgcctgcttgcccactggcatgaggagctcaaggtgaccagatagtggtcacaacttcaagttagtggccttattgtatcttttggaggagttctgctgaacactagcacctctaccccaccagagcttagtttcagtggatcactgggagaggaaaaggactgaattccaccactactccttggtttccagacccaagtattctagtttttggagacacagcaacatgtattggccattaattcagtgactttcccaaccacattctggaggagagtcctacagctcagcaccaggtggtccctaagctggtgccttagctgagcctttaacaggccttcccaccattgtattaatctagatgtttctggggtatgtgctacatgatcaagtcaatggagtccttgatcattcactcattgtcacactgcttttaccataaaatgagtcccttcatttgaagcaatgttgtgcagacaacatgccgataaatccaacattctgcaagtctttggatggcagtgctggcaaaggaacttggtcagggagggcaaacccatttccatttgggtactgatgctgaagaggaaaacatactcaggacagggtctgaggggatcaacttatcaccaaagggttggctggcctctcggaggactggtgccatattgagggctccgtgtcagtcttttcagctggcaggctgggcattcatcaatgtcagcagctatatctgctttagagggatggggcccatgcttctgggcctgtgcttagcatttacccctgccatcattgtcactgtttaaggcttctccgtgtcagctccttgatagtcaaggagagagactggctgacatccacaggatcagtcaccctgtcacctggctgttgaattatctcctctgtggtggatggtttctcgtgagcattgagatacaaagaccaacacgtgtgctcatttctgtaggtcaatctacattatgcttccctagatctcctggtcccagatcatccaatcttgtctttcaggcctctggccaacatcgaagtcatttgcccactgctcaggcatctacatacatcataatactatactacttctctctctttcaaagagtttgaccaagtgccccactcatagttctaccccctgggaggagttctcttcaccgttatcctttgcggccacccttgagaaggctgcaatgcagcaacagctcatttcaactagcactgacatatcacacaggctcatgtgtgaagcaacctgggttctttccttaactgattactggttgtaggaaaccacccatgaagccctaagtgtgaactcaagaaggggtgttggtgcaaagcagtaagtgacctgggagtctgggctacctgttcacataatttactcgtgctgtctagacctttttaggcctgatctcaaatatataattggcatagatagtcttagcttctggcagaacccttacattagcaacttgacttgtagagtctggtaggaaaagtcaagtggaagtccttgaaactacaccctttcctccacttcaaggcagtagatcagaagcaaaatcacctctcagaaagtattgcaggggttagaacccctatcatgacttaaatgatgcagggtatggtagatcccattacatttcaattaattagcttgtataggcccctgcgaaagccaaatctattatcagatgatagtggatttccaaaaatcagatgatagtggatttccataaacttggccagatggtagcatccattgcagctgccatgccaaatacggtatctttactggaatataccaacatagcctttggtgtgtgggatgcagagtgacctggcaaagtggaatcacaaggaagataaaaaccagttcacttttacatggcagatacagtagtatatattcactgttttgccccaggagtatcataacagctctttgttataatatagtccataaggaccttgtcattccaacatgccatggactatcctgctggtcccttatactggtgacatcatgctgactgaagatagtgagcaggaagggacaattgccttagatactctgttaagatgcatgaataggtcagaagctgagagataagctccatcacctgtctcatcctgggttattcagatagtagcatctgaggctaagtcttgtgtgcctctatggcattagggagtgtgatcttagagagcagaagtgaaaaggaaagggaggcgaggtaggaggaagagcccaataagaggcaatagacatgacggactgctctgcaagcattgtgtgaccatcttctgagatgccttataaattactttcttggcacagtgcatctggaagaggaagggagaaaaatacatctactggcttccattggctgaaattttgccccacagggtgttatttgcactgtacttccaggttgctcattgcaggcactaaggatagtgctgaggatgtcatgccttagcatcaacagggaagccctggggtggaagtgaaaggtgatcaatgtggacatgaggccaggggctgtgagttgtatctgcctgaagttggtgagagtccaggtagagttggtctccacaaaggggactgctgttagaacaagtggccagagaccctggagacgggtgagactaaaagaatttcaagcagctatcttaatttggattcccgcagcaaaagactcagaggcaaggattccactgccagcagttcacttggtcagttttcttaagaagcactggaaggggagtggggaaatgaggcggccaataaagagtgagtgcacaatacccctgtgggaaaccggagctcagtcctgtggaaactctggatagaagtatagaatgtgtgcctgcctaggtgttcccaccagctgggtaagggggctgagattctcatccaccagctcctgaccatcactgattgagagctgcttggggaaggggttgctccattaatttcccaacacttctggtcttctgtgcttgtgggcagagcaggctccaggggccagagaaagcgctcaggtgaagggatgcaggtgctggcagttggaagacagccaccctgcacataaatgatcaagatggaggggatctggacaggatgttgcagtggcacataaaaggtgtctgatacattctccctcctttttcttttcctcttggattgtcagattttcaaatccatcattttctcttatgttgaaccaatgactcttgtctcagcctgtggcccctctttgcatatccaaacacatcaagatgctcagcagaacaaatgagtcctccttggaaggtagttgtgggcttaaacagtcattattttctcttggttatcccaaaggcagctatctctttagttattctagtaaattctattctagttagctagttaaatctattgcactttttctgcacattaaatcagatgatatgcaagctctaactacctcctgtagacgttctcatcacaactccacaagggaggcattgtacccatgtagtgaataaactgaggtctagaatgacatgcactatattcttggtaacttcttcagaaaccaaagttttagatgatttccacagatttttgtgccccttccagctgcttgagacagtatggagaatgcttttggatattgagttatcagggacattgggtagattatgggaaaatggaacagcctattaatttagtccagttctgtaagagttgggacataagatccccagtcttcacacatcccaatctcacagattacactgaacggtggtaaacaatttagatcagcttgggtatgacacgaagcttcctcttggctatttctacaacttaacattgaatggaaggaaatcacttaagccctaaaaacactgtctggcaggaggtaaaatgtcttgcttggcttcctgccccatccctcccacacccacagctgggaccatttggcccccacttcagctcccaggcctgagaccctccctgttcttcatctgcctgagttcagggacaagctgcaaactgagagcccttcttgaatatgaacatggtctggcttcccaggagaaataggtgcaaaatcaacaaccttaacacgagtctatttccagtcatttgtagatgagaagtgtgctttgggaaacttcatttttagattccagtgaattgggtatcatcagttacagagaaccaacaaaatatgaaatgtgcacataggacttccctgcaagagtagaaaggaatctgttgccttatgcatatgtatcttggactgataaattggatcacaatcaagtcttcacccttcatgttatatatgtaactgaggaggccaggtttgtttcataatggcaccttcatttttatttttttcaatgtacacactttatttgtatattaaacaagtagaaatatgtttttccccatctttctttaaacatgttcttctccccatatatcttctgtttacccatttttaacaggaacatgagcattcaacctattccattttttcttatatgcaaaggcagagtgcaactgtgataggggcaattgattcttagctttggttttggggacaatatggggtggtgggaactacggcaaactggacagtactgccttagctgaaggcagcagcccctattcaatgccaatcaattgttggcacagagaatgcaggccttatgtcgccaggttttccaaaatttcaaaaagaatccagaagtctcaattttactgtgcaattctctaattatcaaatattgctagccaatttaatttggaggttgacacccagcagaccagataaaacatatctatgggcaaaattgaaggctgggcatggtggcttatgcctttaatcccagcactttagaaggctgagatgggtggatcaacttgaggtcaggagtttgagaccagcctggccaacatggtgaaaccccgtctctactaaaaatacaaaaattagccgagtgtggtgatgggcgcctatagtcccagctacttggaaggctgaagaggagaatcacttgaacccgggaggcggaagttgcagtgagccaccattgcactccatcctgggtgacagagcggcactccatcctgggtgacagagcgacactccatctcaaacaaaaacaaaaaccaaaatcaaaaatgaaacaaaattgagcctatggctgccagttcacaatctctggttttaaaactgtcaaacagaaccctagatctactatgtagccataactgatgtggtttttctaagcagtatagaaatatagttctaagaaagtcaattatattcctagttaatgtggtactttacaaacaatagagaaatatagaattatgaaagcaaattccctatggttagtgaatcaaaataaaataaggttaggcccatcacagagtggctgcaagtgggagagaatttacattcacagggaatgtgaacagattaggaaagaggcctcaagtggacaattttgtcgggatgcagttcgccttatgtgttagctccacatgaggccaacctggttctcgagctgctttggctactggagcctcaatcccttaagaggttgatctagggtcccccctctgtcttgccagttgtccccctccacaggccgcagccccgatgagaatatccacaacctctaataatagaagccaaaatccaatggacagagagcactgtggtgtaccagtaggtggtcccatcaagggactcacagccaccattcaattcaaggtagttgtgtccattatccaggtggagaaataaaaaatcagaccaagggcaagatttgcccaacttcaccctgcagccagggccagcattggactggaacccagactcctgatctccaggccaaccatccctcctctgagccctcaccgcccaggctggcatgaaccctttcatatccgagtgctctgtgtctccactgcgattttgctcttgagggtggagagtgagtctaatcttcttgcttactggcaggcagcatggctgagtggggaggagcatgggtgttgcatctgccattcattagccttggaatgttttgaacctcagctttcttatctatgaaatggggatcatgacagtatcacctttccatggctgttgtgggtattaaatgagataacacagctaaagcatttagcagagggcttgggacataatccacaccaagtaagcattagttgcttatatccattcccatgccatctcctctgcaaggctaactcacttggcaagaggtgacccatcctctagagtggaactgaatcaaacacaggaactgaccacagagccacggcccactgtggctacttggtgcttcaggaagagaggtttctagtgtttacctggcttcagagctgtccaggtctcagccaacttcagcggtgcctcttctcactccaagatctcacactatgtgccgggtggtaatcttaataaaaagcgaccattgagggtttacccagtgccctgcgataagctctgcacagatgggttagtctgccctgaaccgcctcactcccactgagggctttcggaggcagagcctggttcatgacccccacatctcatcacagggcctggtgtgatgcctcacccaagactgtgctccttcattcatccagcgtttattggcatctcctactacctgagctgttttaggcagggaacaaagcacagataagccctcctggagcttacattctgatgaagggggcaggcaaggtatacatagggaggaaagccctggaatccagtacattaaaaacttttattaggattatctctgctgcatttagttgtatgtatcccttatggcccccaggcaggtccactcctgggcattcaagtcggtccatgtgtcaggcgtgcagggtgggtcacagcatctaggagctcagtgcagcttgggactttgggacatacgctccacctctctgagcctcagtctccttgtccatcatataaggaaatcactgattccagccttcctgggctgtggagaggattccctcagcggctgtgaaagagtgctttcttgcgggtcagccccgacaggacagacttaagggcgggagggagcccatcccgcttgccccaacgaacgcgggcgcggggctttcctcgcaggttacataaggcagccgcgggtggaggcagcagaggcgagcgcacgtccgtcgagggggaaaggggcgtggggaggcggccggggcggccggtatcccccgggcgtgagtgcgcagcgcgcgggggagcgcagggcgcggcggagtcgggtttcagagcgcgggtgactcggggcgcgggccgggagccgggattctgcccgccgccgccgctgccgagcgccgcctttgttccctgcaggaagggcgagcgcggcggccagcgctcagcgacccttcgtcctccgctaagctccaacgctctgctcgactagccgcgcgccttccggggctccgcagacccgcgagatggcaccaaggtaagacccgcttctctgcttcctcgcgtcccgggcccctccaatactcttgcccgcctcaccttttctccctcgggcacatcttgcaggaggaacaacgggcagtgctggtgtctgctgatgctgctctcggtctccacgcccctccctgctgtcacccagacccgcggtgcgacaggtaagcaacccggtcggagggtggcaccggctgcctccgcgcccgtgggggaagtcggttttggcggcggacgcggctgcgatgcgtgcctcattcctggacataaaagggagtcttgccactcagtgcgcactggcggtcccgcgggcggctacctcctggcagtgcaggggttatagctgtgaatgggatccctgggcagctggggcggttggagcgttgtctgggcacccgagatgtctgagctgggtgcggagcctccaatcttaggcagagagggacttcagaaacagcgccagcgccagcgccaacagcctcagcgcacccagcgccagcagcttaggttgtgcgtgctggctggcttctggtaagggcaggtctggtgcctctccgcacacaggtgcgaagcatgaacaccgggagggacatctggggcttttgctgctcaagaaataacggaactgaattgctcggttgcttaacccagctctgagttacctaagcggtcacgtctatcatgggcagtggctccaccggtggtggaaagagctgtggcctggaagccagagatctgatcccttccgttccccgggcctcagtttctccagcagaactcaggcggttggctgaatagtaagatataagttaaagtagacctaagttaaaatgggcctcggttaaggtcagactgcctgggtttgaactgtggctggctgagtgatcttgggcaatggatttcatcgctctgtgcctcagtttccccatctgaaaaaggcgattaattagaccattttaccttcctagaaatgttgtgaatattagagaaattagaaataatgtgcttcccatgattccagtatatactaggcacaaaataagtgatagaaattactgcttgattcttgcagtaactatgtgttggaaagcaatgcaagtatttttatttttattttagattcagggagtggtcatgtgtggttttttacaagggtatattgcacggtgctgaggtttgggcttctattaatcccatcgcaatgcaggtatttttataacattgaggttgagagaagcttagaaagtggccagtccaaaagccaggacttgaatccaggtctgtaggctcttgcccttgctcagctctttctccatgcagttttgcagaagagccatgctttctatagcttctgaccccctcccctttgaatttgggggattagtacacatcttcaattgaataagggaacagaaagtctaggaaacaacctctagtcggcccaaaggaaacgggattgagaaggtggccttggttaactctttgtttgcctgaagaagcccaagacagcccattgtctcctgggcaacaagacccaaatccgatgatagcttttcctgccagagtgtccagcctggcatttattgcagatcaaagggcagctggagtatagttttagcttctcagccccatggctcatgtcagaaagttgcaattttgcatatgatatagggccctgccaactcagtggcagaggccaactttgggttccatggtcttttgtgaactttgctgcaacttccagtttcccaaaaggaagatggatctggggataggaactttggtgtttctttctcctcctgtgtgtgtctctgggatccctcagtgtcagggctgttgtttctaacacaaaggaagccctattcccatttataatgtaaaaagggagggccagcaaaccttcaggagctgagaacggtctaaggagggccatttgcaactgatgggttttcagtgcccctttggggatgtgaaacgattcctaaaaatgtaaactatcctcctgcaaactgcatttgtaatgcaatttaatatccctaatacttataaaacactttgtatatccaggtggaggtgtgaacatgttcatatttcattcatccaatccttacaaccactccaggaggtgaggactgagaacagttactatctctgtttttcagatgaagaaacagaggtccaaagtcacaagacttctaagtggctggggtgggatttgaaccagacagtctgactccagagtccttgctcttaaccatcctagtgtgtagttagaagagcttcacggatggagaaggctttaggggttccatggtctccaatgagccccacaatctgaatgtcacaattgtaacatgagtccattgcatggcattgtgcagtcttcaaagcacaatgtcaccttcaccacgtccctggaatcaccacccagcagtgctgagaagtaaattgggctctgtcttacagaggggatgtgacttcctcaaggccgcatgactgtaactgggtagatccataatagccctctcacgtctgtgaacttctgggctggtgctgttccttccataggaccactgcccaactggctataaaaaacaattgccaagacttcatagcactatgaaccagcagtgttttaagtgccctgccatgaatgagctcagtcaatcatcacaacaaccccatgtcttatccccttttacagatgaggaaactgaggcacagtcttttgcccaagggcatgtagccttcagtaatataagcacaatttgagcccagagggtctgactccagaatctgtacttgtaaccactatgctgtatgcttaagtggggtggcttctgaaagcatgtttgtaagtgggctgttatgagcggaaatacatgttcccaacgatttggcagtttcttaaaatgttaaatatatacttaccctacaatctagcacttccactcctaagtatctacttaagggaaaggaaagcatatggccacccaaaaactcatatgtatgttcatagcagcattatttataatgaccaaaactggaaataaagttaaattcaccattagctggtgaatagataaacaaatgaggtgtatccatttaatggaatactactcagcaataaaaaggaatgaagtattgatcaatgctacaacaacatggataaaccttaataccattaagctaagtaaaagaagccagacattaaaaagcaatacattgtaagagtccctatatatgagatttctgtaaaggcagaaccacagagacagaaaacagaagcagagattgactgcaaaggggcatgaggaaactttttggggagtgttctaaaactggattgtggtggtagttgtgcaactctataaatttactaaaataatctaactatacatttaaaatgggtgaattttatggaatgtaagctatgcctcaataaagctgcttcttaaataaaagaatgtattttcccagagcatctaggccccagatctggtggggcttcaaggtggggttcctagccagcctggtacagagctggcacacagctcacaacttaaaagctgctggcctcttagggcattgattctctcagaaaatgggtccagagttctgcctgcacctccaggtctctggatcgactctccctactatccctgaatgccattgtgggcccaggacagggctcctcaggtaggggtagaacacatgcatatgggttttttgcaggtagttgatctgttaaaaagtgggtctttgtaaacttcctgatatcctgcacgccctaaaacagcacaagttcaggtattggaaaacctgggttccactcactgacttcctccatgaacttagatgagttgcttttcccactctgagcctgttttcccatctacgaagtggagaggcaagagtcactcatctctgtagtcctaatttaaaatgttgggaaacaaaacaaaataatatttttctagtttgaggtttgattatttcacatagtttagttcaacaaacccattctgtgctggccctcatgctggctgggtacagaaaggatttgggcacagagctgccccaaaggggtcatagttcacaggaagaaagaaagggccacagacaactgtaatgccatttttcctgaagtcttctcatctaccatgcagaatgtcctgtgtgcagccaatcccatccttctacaccatcctgtttaaagacacacttgtcggccgggcgcggtggctcacacctgtaatcccagcactttgggaggctggggcgggcagatcattaggtcaggagattgagaccatcctagctaacacggtgaaaccctgtctctactaaaaatacaaaaaattagccaggcatggtggcgggcgcctgtagtcccagctacttgggaggctgaggcaggagaatagcttgaacctgggaggcggaggttgcagtgagccaagatcgcgccactgcactccagcctggcaacagagggagactctgtctcaaaaaaaaaaaaaaaaaaaaagagacacttgtcagtgggtgtcacccacatggcctcttgtacctccaatggtcagggttgagctggaggacaacaccaatccttccttttcctggtaaagtttcagggtcattggaatacccaatattttagaagataagggggctattgtccaggtagggatggtggtgtcacaagtaatttgctcttgctaataaagtgttgatgattgcaaattatttgcttatgtttaaactgttttattgtgaaatacaacatccattcagaaaagtgcatgctaaaggtacagtacaatcttgtatcacagagcaaacatgtaatccagatgaagatataggataatccccagaaggtctcctaaacccctttgctgtggttttattttcccttctttctctctgaggtaaccattaccttgacattaacagtcatccctttcttgctttttaaaaatagctttactatctaagtgtgtatcccaaaattctgaagttctgttttactcgattttgaactttttaaatgcagaatctattctttcatgtctgattctttcaatgaataataagtttttgagatttattcatgctgctgtatgtggctgtagttcattgccattgctgtataatagtccattgcattagcatagcatatgttacttatccattcttctccaacatttgggttgtttccattttgggctaatgtaatagtgtcgctctgaacattcttgtacatttctctcagtgcacatgtgcatgaatttctgttggttctatacctacgagtggagtgctgaatcagagtgtgcatatcccccaactgagtagacaatgccagcatgtcttctaaatggttgtacagatccacacagctaccaagaaatgagggcctccatttcttcacatcctcaccagcacttgatcttgtcactgagcttaacttcagcatttctaatgggtgcatatttgatcttactgtagccttaatttccattttcctaattattaattaccttttcatatgtttattgaccatttagatatccagacttactttttattgaggtgaaatttacattatataacagtaaccattttgaagtgcacaattcagtgtcatttagttccttcacaatattgtgcaatcaacatctctatcaagttccaaaacattttcatcaccccaaaagaaatatctatgcccattaatcaattgctccccattccctcattttctcagcttcaggcagtcactaaactactttctgcctctatggacttgcctattctagatatttcatgaaaatggaatcatacagtgtatgacctattgtgtctgacttcttccatttaacataaagttttcatggttcactcatgttgtatcatgtgtcagtacttcatgcctttttatgactgagtaatattccagtgtatgtatataccaaattttgtttttccattcatttgttgatggacatttgggttatttctaccttttgttttttgtgaatagtgctgctctgaacatttgcatacaagtattcggatgcttgacggcctgtttctacttctttgcacctaggagcagaatttctggtcatatgataattctgtgtttcaagtatgacgaacccccaaactgttttccacagtggctgcaccatgtttacatccccaccagcaatgtatgagggctttaattatgcacatcatcgccaatgcttgttttcagtttttaaaattatagccattttagtggatataaaatggcatctcattgtggtttttatttgcaattctttctttctttcttttttctttctccttccttccctccttccttccctccctcccttccctccttccttccctccctcccttccttccttccttcccttcccttccttccttcccttcccttcccttccccttccttccttccttccttccttccttccttccttccttcctccctccctccctctctctcttcctttctttctttcttttgacagagtctcactctgtcacccaggctggagttggtggccggcccatcttggctcactgcaacctccacctcccaggttcaagcaattctcctgccttagcctcccgagtagctgagactacaggcatgcccagctcatttctgtatttttagtagagatacagtttcaccatattggtcatgttggtctcgaactcctgacctcatgatccacccacctcggcctcccaaagtgctgggattacaggcgtgagccactgtgcctggcctatttgcaattttctaatgacaaatgacgttgcgcattttttcaagtgcttcttggccaccatcttctctggagaaatcctgatttaatgggaagcatatgaatcagagcagcgcagaacttccctctaaccaccccactcttgctccctggcagtctgatttgcttttctgagtgagagagatgtgggtaggagtcacacctgaagttttgcctcattgacctgcagtctccatctcccaaaggacaattgtctagagctggccactttgtccagagctggactttagcaatttgtcattattataaatagtgctgctgggacatcttcagacaaatggcctttttcttttggattatttcctttggcaatatttccccccaaagaactcacccatcaaagaacagaactggttggacagttcttactatgtatttagatggatttttcttatttaatcatgatgcttcctagtataattgccctcactgggttctcactgtacctgagatggagtcatgctcctggccccagaggaccctgccttcctccactaacactaagtccctatggacttcagctcacatcaaatcactggcaggcttctgaatgggacatgcaacgtcccacacctgtgcttttgcataggctagtgccatttttattctattattattttttgggacagggtcttctctgttgcccaggctgtagtgcagtggtacaatcttagctcattgaagcctcaaagtcctgggctcaagggatcctccttcctcagcctcctgagtagctggattacataccctcatacccagctaatttaaaaattttttgtaggcatagagttttgctgtgttgcccaggctggtctaaaactcctggcttcaagcaattcacccttcttgacctcccaaagtgctgggattacaggcgtgagccactgcacctggctaccagtaccattttaaaaatgcctttcccccatagtacctggggacccccaaatcatccttctaagattctactctgggaagctgtctctcctctcccaggcataatgagcatctctttgtctcagggcttctcagactgtacagtgaccactgattagttgcctgcatccctaactgctacataggaagttctatgaggcagggatgggcctgtccaactctgaatcctggaacagggatttcaggtgcaggactggcatgaagtgggtactcagcatactttttcaatgaatcaaagaaggaatgaaggggttagtctagcctgtggtctaatgcaccaacttactatgttctctgtggtgtgtaagtcattccaattcttccatggctttgtcagctgtagggtgaccttgactgagtactcagggaatattatagggctgtcgttttcttcaatagtgtaataactagttaggctggaattcactctaatgttaatttgctctttatctttcttattatattaattggataaaaatttatttcccagcttctctctactcatcttattcctgattgcctcagtttgtcaaaagttgtgcatttatcttttttcttctagctaaatatgtaagttgattttccagttttcttttgatatctacagcttgatcacttaaaatgaaccatagattaggatataatctctcttttttttaagtctctctatgttgcccaggctggtcttgaactcctgggctcaagcaatcctcccaacttggcctcccaaagtgctgggattacaggcatgagccaccacacttggccagattagggtataatctaaagccagttcttttccaaagtggtccccaggtttcccccaagtactaattaaagtgtgagctattgcctcatcactgtactgcccatcattgttgtgtgatatcttatcatataatattttttcttttaatgatatacttttatttctggtatctctgtattactgatcactttcttgtgctaatatgtgtatgtcgttttaaatccatacaattttgatgcttgttactttgtgctatgttttacagtctggtaagagaagttacccctgcctacctccttcattaagccacgaattctttagtataggttggcttattccataatttctgcatggtatgattagataatgggagtgtaccagtggtagtgggtaggtgagggttgtaaaaaggaggcaatcttacaataagactcaatttaaggcattaatgtctagtgtggagaatggataagcaaataagacctcaaagtcagagcatcagattgtggggtatgacctattgctgtcaacaaagtgcccaggggagctaaggtggtatcagaggtgttgggaggagccaggtttgctgactgattaccttcttctgctctatccaaactacagagaggaaaagtctagggttagagcagatccaggtcaacatctaatgagagagacaggggtccctggtcacctaatgaatgcagcccactctttatccccattataaccaaactcaacccaacccaaccctatccaacccaactcaacctaatccaattcaacccacctaatccaatacaaccccatcaaactcaacccaatccaacccaacccaacctaatccaatccaaccaaacccatcccaacccaaccaaatccaatccactccagttcatatttgttgcataccatgggtggtttaaaggacagaacagggcaaaaaactattctgagggccctggtatctctcccaagtgaccagggcccctgaccttagatgccagggaacccctttctgggtttggagagcttggctggagtctggcttgcaggcaacaccctggccttaggcctctctaggagttactcctcccatcactgagggactcaaatggggcccagcttaaaacactcctcccatctaggcagtcttttgtgactagcttcctcccaaagggaatttctgttgaagtcttcaaaatggtctgtctgttctgtattatggcttctcttacagatgtctgtcttcctcctattattcctggcttcctgctgtcccaggcactctctggagtaggtggcaggatggctgaagagccgcattagactcagtgcccatcctggagggactcatagttcagtagtagagacagtgcgcagaagctggcttgcatgctaaggagcttgtcctgagtttcctaacacagtgtaagcaagcatctgcactgccaaagtagggatgtccatttccaccaggagatgggagaggcagagggatgtgagaagtgtttgtaagagattcatttttttcaataaaattttaaaaattggtaataaaaataatacatagttattataaaaactagggccaaaaagaggagtttaaaaagatcacatattatcttgtgactcaaagataaaccctgctagcatttgatggactgtgtttcaagtttattttccacccctaagtatgcacatagatcataatatgaacagaacattctgtacattgcatttagtgtttagttgatggcttttttcccccttaacaatcatctagacaccttctctggaacattaaatactcgtctctaatattttttgtgtttgtaatagtatttcattgtttggttgtcttgtaattaaacttttaggctgtttctcattgctcactattatgaacactattgtgacgatcgtagtcttgtagctttgtatttgacgacttctgcaattatttcctagcacaacacaatttcctaaaacaaatagttgggtctagtgcatgcccatttttaaggcttttgttgcattgttcagacaggcaataataatttatactccctgcaacagcatatgagaacgccaagcccaccctgccttgtctattactgctgtgtctctaacccaaaaggagcaaatgacaacaggtaaaggaacagtgccaccatccttctccaaatggtggccttactcaaaagagctgagggctcctcccaccctccctctccactcttctccttcattcatccattttgcacatgtctgtggaagggctagaagagggtttttcaggaaattagaatgtgagagctcatgtcatgaggaccttgatggtcatcaggcctccagtaccttggaatcattttggggattccaagggggcctggtgcccagtcctccagctcttcagggattcttcatacatctgagataaggtccagacaccagcaggtttgaaaatctcctgggtgcagtctaagatgcagccaaggctgagaataaccaatgcagtccaactgcttcctttcaaaggtggtgatgctgagtcccagagagggactccttgtcttccttatctgtaaattagggcaattcctactctaaggattagtgatcgggcctgtcactggtgatcagttcaatgcctccttacttccctgctcccacatcactgtgggttccttgagggcaggaagccgtttttatttatccatgtttccccagcatctgacatggcactaaatggacacaatgagcatttgaataagttaatgaatgaatcattcaaagcctgggactgtggagatcttagtgaaaacccagcattatgaacctttgaccagcaaagtctatgtgcgcctccagccacactgaaagaccaccctgcagccatccactgtgcaggatgatggggctagagcagggtgagagtaggcactgcctatagtatgtatatcaagaatagaatgtttcatgaaagaaaagttaagctgtgctttttctggcataggaaagttacaaccatttcatctcacagaacatagagtagagattctagctgatgacaagctgaacccaagttcttgcaagttcaacagcattacacacagaacctctgaaataggcccagccaactgcttctcctctccaactacaatcttagtggctagctagttctgacttgattgtctagctcagagaaggaaagtgactagctcatggtcacagttcaagttggcaggagagccaggtctagaaccaggtatcctgactcctaggccagtgctctggtgcttcacatgaacctaagaaaataccaagggtatggctggggtatggtggctcatgcctataatcccagcactttgggaggccaaggcagatggatcacctgaggtcaggagtttgtgaccagccgggccaacatgacaaaatcttgcctttactaaaaatacaaaaattagctgggcgtggtggtgcacgcctgtggtcccagctacttgggaggctaaggcaggagaatctcttgagcccaagaggcagaggtggcagtgagccgagatcatgccactacattccagcctgggtggcagagaaagtccccatctcaaaaacaaaaacaaacaaagaaacaaaaaacaacaacaaccaaaaaacagtatgatctgtgctaataattatatagtgctttttatgtgccaggtgctgttttaagttttaatatataggatatacatatatgttatatatacacacatgcatatccacatacacacatctgtgtgtgtatgtatatgttttatataatatacattttatatgtacatttacatatatgtatgtgtatctgtgtgtgtatttcatatgtgaaattctcaccacagccttgtgaaatgaagaaattcaattacaacttgacatcagcacacaggtctgtctcccagcctccatcctctccaccctagaatccatcctccacactgcagccacagtaatcttctagcttcttgccactcaatcttcttgcttctagcatcttgctacgtgtggtccatggaccagcagcatcagcataacctgggaacttggcagaaatgcagaatctctggcttcacccccagaactcataaatcagaatcacaccatctaggggactgaggatagcattttaacaagatcctcggtgattcgtgtgcacttttaacatttgagcaacactctaaaccagctctgattgtgttgctccctgcttaaaaccctttgccatcttcccatgatcaccatctgtggtaggcagggtcatggccctctgaaggacccacagcctaacccccaggacgtgtcactccattaggttctatagcaaagggagttaggctgcagatggaatcaaggctgataatcagctgacctcaaatgagggagattgtctccgattatctggttgggcccaatatcatcacaagcgtcctcaaaagtggaaaagggaggcagaggaaatcagagtggtgtgatgtgagaggacttgagcatccttgtttgctagctttgaaaatagacgaaggggccacaagccaaggaatgcaggcagcctctggaagctgcaaaaggcaaggaaactgattttcccttaaagcttccagaaagaaccatggtctgctgataccttaatttttatctcagtaagacctgtgttggacttctaacctccagaactgtaagataaaaaaacttgtgttgatgtaagccactaagtttgtggtagtttgttatagcagcattggaagataaatacagccttctactccttagtgtggcatttgaggccctctgaagttccaccaagtgctgtcctggcctcatctcccagaatatcccttcccacaccctaatctcaaaccaacagagtctccagagtagctagagtatgggaagggacactctgaaaaaaccagactagggttatttctctctctctctctctctttgtgtgtttgtgtgagacaggttctcactctgttgcccaggctggggtgcagtggtgcaatcacagctcactgcagccttgacctccctgggcttaagtggtcctccagctcagcctctcaagtagctgggactgcaggtgtgcgccaccatgcctgaataatttttctatcttctttttttttctttttttaagaaatggggtttcactgtgttgcccagactggtctcaaactcctggtacaggcaccatcacacctggctggggttgttctctatgccaccagcacctagccctgtgcctggcccctggccagtactcaggcaatgccttttgaagtaataacccagtggaaccctgttacgttcaggtcgccaccagccacggaggagcccatgacatgccggaggcaactatggcaacagtgcgggacatggtggagactctcccagagcctcagccttaacattcctttgctcttcttctgctgtgggcaaatcactgtacctctctgggcctcagtttccccatctgggaaatgaaggggttggaaagacaattctaaaagcatcgttagcatgaacatgctaggatatctgagttcagtttggccgcacgttctggcagttgggggcagtgattcggctcagctctgctcagccctgttcatctcactgctgagcacatcctgcactgtcatcccattcacaaagtgggatacaaaactgcccagcaactgtgtgtatttggtacaaaacagactacagctgctcattccccctgtctagttaaaatgccaaattactcactctcccacagaaagaaaaaaaggaggggtggaagaaaccatttctcactgcagagtttttccatgtgacatattttctaattttatttcaggtctaactgtctgcagtagatggctccatttcagggtcttcccctccccttttagtatatgagctttcattaaggaatgaagtggctttatttgtttaatatttgcaagtgtgggctgatatcaaattgcaactgaatgtcttcattttctcggcggagggaagttctctaagatgccccgcactggtttagtggctcggattccttggttctaggcctggtcacaggagctttgccaagtcccctccattctctggacttagaaactcaaagtgagtattccgcaaagtgaggaaaaggctggctcatcacggagatagggtggctggattggaagccatggctgatgcgccccatttctaagagtggttccatttgagactgtgttggaatggtatgcagctcagtttatgtctgtgctcagctcctgtcatctctgcactgttgctttagttcatggaatggctgagaaatttttcatacctggaaagagtattgtagctttgttttaaagaaattaattctggccaggcatggtggctcacatctgtaatctcagcacttcaggaagccgaggtgggaggatctcttgaagccaggagttcgagaccagcctaggcaacatagtgagaccctgtctctacaaaaaaaaaaaaaaaaaaaactaaaaactaaaatgatctgggtgtggtggcatgaacctgtagtcccagctactcaggaggctgaggcaggaggatcgatcacttgagcccaggagaccaccatgcctggccagaattagtttctttaaaacaaagctacagtactctttccaagttatgaaaaatttctcagccattccatgaactaaagcaacagtgcagagatgacaggagctgagcacagacataaactgagctgcataccattccaacacagtctcaaatggaaccactcttagaaatgaggctgcagtgagctgtgattgtgccagtgtacttcagcctgggcaacagagtgagatcttgccataaaaaaaaaaaaattaattctgcccctgcaatgtctgttgcatgcaacctctcccttctatcttcttgccctgcctggcttcaggcctgtgttacctctttctgctgggttgctacagcagctccctggccagcaggatctcccatctctctgtcctctagcatggcttctcactgtgagtcagagtagcttgtctaaaacacaggtcccatcatgtcacatcccctgtcaaaacgcttccatgttttctgtgacgcacaatgcattccacactccttgggttgcagttcaaggcctcttctcctctcacatccctccccgtaccctggctctaccaccctgaactgcttgctggtctctgaattgaccatgcatgttcccttctccaagcctttgcttgcgctgttcctcagcctgccctatggaaatcctctgcattttcaccttgatagacttgttgcttaaactgtggtccctggaccagcagcatgggcatcatccaggagctcattagaaacagagtcccaaggccgggcacaggggctcacacctgtaatcccagcactttgggaggccaaggtagggtgattgcttgaggccaggagtttgagaccagcctgggcaccatagtgagacaacatctctataaaaaattagcatgatgtggtgacatgtgcctgtactcccagctacttgggagcctgaggtgggaggatcgcttgagcccaagaggttaaggctgcagtgagccgaggtcacaccactgaacgaaccccagcctgggtgacaaagggagactctgtttcaaaaataaaaaagaaaaaaaagaaaagaaatacaggatcccaaatcctgcctcagacccacaacatcagatctagacccacagcatcagatctagacccacggcatcagatctgtaccttaaccaggcccccaggtgatgtgtgtggcactcaagtgtaagctgcagtgctgtgtagcttggagggcaagtgctgaatctgggcagtcagatagagctggcctggttccaggctctgcatgtatcagttggtgaccttggacaatgtactaatccttttgaaacctcagtttcctcatctgtagagtgaggaaactataaacgaaataacgccccaagctcttagcacagtgcctggcacatggaaagcccttaatgaaggggagtggccagtaacaaggttccatctcagtgctagctgatgttgtgcctaagctgtcctgtgtcctctctcagcattgcttgtattgggtttattccatcagaggtgagaactcatttgtaagtccatcttgctgaggatgggaagggccaggaccaagtcatttgtgtttggagtttagaatcattgaccttccagtggagggagataaacaatcataatctgatgtggggaaagtgaaacatagctaaacaaggactttgcaaagtgggtgggatggaattcattccagagtttctgcccttggtagaaatggccattctgcctgttgtaacctgggggctttctcattcatccatttgtttacccacttttatgtaatatgtattgactgttctctgaatacaagcaatgtgtgatatcctgggcagaaaatgaaaagcaagataggcttgctgcttgccctctaggatcctatagtctaatgggggacattgatgctaaataaaggattgtacaaaaagactctttatgtttataaatggtagaaaatgttagaaagtgcaatgagagctatgaaagcacatgccaggacactctcatctgtaccagggtgtcaggagagtctccccaaggaatgggatttaagatgagatctgaggggtgaacagatttagccaggaaaggaggtggggatgatgggctggaagaggagtggaatgttccagatacagagaaacagaatgaggagaggatggaagagacagcctgaatgtggctcgaacacgttgagggaggaaggcagggtgaagtttctgggatgaaagcagggccttcgcccaggagccgtttttcctagcctggccctgggggagcatcttggcttcccaccctcggtcagtcctgcagcactaccgcccagggccacccggggtaaaggcctttggtctaggtagagtgcagtcaagccctggattctactacctgccttgctcctgcctctgcttatcagacagtgaattgcttcagggcgggggcaaagggtctctacctttacatagcgtaagagaagagaatttaagagacttgcagtaaaatgtcaggaaggcagagtcagaagaaagcccggagccagcacaaagagcccctggtccaccttggcctctcagggcctcccaggccacgacagctgcctggcaaagaggtggtggaggcaagtgaggaaggtttctaacaattgctgtctgcggttagactccagtcagtcctggctttggaaagcttcctcccgtctatacaacgaagaggtcggaccagcgctaaggtcatccaggtctgacatgatctctttttattttttatctctctctggatctctgtattgagaatgtgcatccgtaaacataggaagaattctcttgccagggaacagaaatgcggtttggggaggaataactcgggtgggaggtttttagatgctttcactcaggggagcaattcctttagacatggttgtacccgtgagacgtgggggatgcattacgcctctcctgtccaagccattcctttggagacctgcttctcaaatgggtgtgctcacagtccttggctgtgtgacagtagcatgcgaagagccacattgtttatttcctggaggattttactcagtggttggtaatttgtggtgaggagaccagtaacaactggggaataatttggaacatttttatattattaaaacaaacacacacacatgtttggagtggaattcaaaacttaagtgcttttaaagataaagcaagagaattaaattttcaaggtcctggggggctctttggctagactcaggccctcaggtttatctgatgacagagtgctttagcagagatgatgttatatacagatttgaggtccccaacttgtgggggatatttagaattattgcaaaggatacatggacattttctgtctacagatacctaacacctgtgtgttgagggggctattaatgctttgatattgacaagatggagatggtcactgccctccaaagctttggattagaactgtcagctccaagagggaaggaacttgtctatcactgctggatctccggcacttagaatagtgcctgctgtacagcaggtgctcaataaatgcttctggaatgaatagaaatgtgtgtgttgatggccatgagaagctttcatttctccatccacgtttacctttccaggaatagcgtgtggagctgctttagcatggagatcttgggtggaatgtgaagaatgctgtcatgcatatgcatgtgggaggctggtcagccttgctcaggttcaagatttccaagaatcactctttggaggcagccttccacccagcgtggtccatgctgcatagcgtaggctccttgtgtgagaaggcacagttcaccatttatgcaccttaggtagctaggacccactgggcctcacttctcacaatgcctgcaagtccccccaaacaccttactcccatcagaacccactgggaacctgaggcctcagaaaatgctggactttggggatcaactattccagctcccccaaattgcagacgggaagatggaggttcaaagagagcaaggaacttcctgggagtcacacacattttagcgatgtgactcccaacaggttccttgttctagaactgggtctggaactacgtcttctgatatccaggtgggtggcatcactccattttgaaattccccagtgctgcttgatcacatccgtaccattctcagggatgtgcttgacagtagtgtgtggttagagctgagctttggaaacatcacatgaactttaaatcctggttcaacactttttttaattatgtgacttgggcacattgctcagaaagagtgtgggtttcctcatctggatggtggtggtgggtgatgggtataggagtcctacctcctgaggctatatgagctactcagcaggtaatgcccaggagtgctcagagccagggatggggaacccagtgctgagccatccatcccacaaagttaaggtcatgcccatcccgttcaccccaaatctccatgacttgcagtgccaggcatgtgacggtgtgtgcttgatagtcatttgtgaatgaacaaatgaatgaatgaacaaaatggacagaatatgcttagcacctgacatttgccctgtgccaccaccctgagagctaagtattgccacctctatttccagataaggaagctaaggctcagagaagttaaagaacatgcccaagatcacctggctagtacgtggctgagcagggacttacatacaagtttctctggcatcaaattccacgtcctttgccctgcaccattctgggggaggctggtcctcctggggttcccccgaggtcacctcccctcccacccccccattcttggtctctagttaggaggtgtccactgggttttcatcttggaaggtctgattccctctcccattattctggtggtccacaggctgttcctccagcaaacatttggagactgtcaagctgtactttcatctaaattaaacaagagtcagcctgtttcaaaatatgacttcagggtcaccatctgttctggctgttcccttaaactcaaatcccattttggagccaaatggggctccagcatcccacagagagtgtgtctctttgcacaactgagcaggaaagtctgtagaaagacacagtgtgtttgacaacaaccctcggacaaatttctctggttatttcttttcccctactcagcagcatcaacgtcattgcatgtgaaccacaggtccccaccacagattcaaatgcattcctttctacattgggtacctagtgtgtaccaagctctgtatgaggccctttcccatgccatcttccgggtcatgggagagagtggcctggatcttacagtggggggaatacaacatgccaaagctgctcgagctggtcacaccatcagtctgggcatcagttttctcatcttggggacattggactgggtattttctgaggttcttcccagctctgaaggttaccctgattcttcatcagcgccttggccaatgtaggcgagatttcacggtgcccactgaagctatgagctcgttctgactgcgctgcttgtctgccctggctgaattcacacaagctcatctgttgggacgccccgggctgttcccagggcagcttgattttgcccagggcataacatgccaagtgctgagaggctgcaagaaagtatgtctcctgctgttgccaaactatcgccttcgcaccacattccagatcacccaattccaccctctccttggcaagaaaaagaaaggggacccaactgcctagggcagcagcttggggtgaaatgaggattcctcctaaaatggtcagctagaaccttcctcaggaatctgccaaggcacccggttgcctgttgcataaattttagtctccttggctggacatttgaggctctctgactccagtctcctaaaggaaaaagaattgagagtagcaagagctgggaagtcccaaccactgcagttaaggcctgcagtcttaagctccttcagcttcagtcatctcatctgaaaatggcatagccacagtccccaccccatcagactgccttgaggttaggtgagctaatgcacctaagtgctgagctcagggttggcctgttgtgagattaacatttctaagtctgaatctctctggatccataattctctcctttttgctccaatgctggaggctatctcggggtcccatttctcccatccttggaatcactcacttggcccttgttttcctaattgtgtgggtttgctcatgctctgctcactccactgtgttcacctgtgtgaagcatctcaggcctatctccactggcccttccttcaggtccccttcccagtgtcccccagtgggcggggagtgctccctctttaagcccctacaggactttcctgtcctttgcttatggctccaagctcaggtcacctgtatctgggccccgtgttggtgtctggtcctttttttccaggggacccaattccttgtcctcttgatcccccagagcccagcccaggtcacctgtatctgggccccatgttggtgtctggtcctttttttccaggggacccaattccttgtcctcttgttcccccagagcccagcccagcgccaagtccagacagggttggaaagtggatgctggttgtggacaaggccagactgggcccaggatagaatgaatgatagtaaggtcccctcctgactcttcttctgggagggaagagagaggaccattctcccctagggagatgtaaattatggctgccttgaggcctgtggataacaactcaagagatttcattgaccccatagtatcaatcatgccaaagaaatcaagaaacaccccaggccatgtttcacttagagaaagacttagaaagctcagaattaaaatactctttcaagctcctcctatcattcagtgctcctcccaacccaatgctgcacccccatggaggagatggggggccttctccacacaggaggaccagggatcttaccgttctgctcctgggatctccagggctggcctgtcccatcctaccttgccccatggccccagctcatgctctgacacccggataggccatgagcagcctccctgaggcctctagccaaacctcaaggaccctaacagtatataacagagaaggggaagcccggttgttcacattctccacccagaccatgttgcagaggggaggaagatggaggcagctggaaatgagtctgaagtctgagaagccagtgtgtttaagagagtcactctcatctcagtgaaggagagccgagggcagccattttgcagaaggctgctcattcaaagcctcctgcttagggagaggggattgcagcccccagcaaagctacaatcgactctgtgtggttattaatattatattatatctcaacagtggggatcaggtgagagctaagctattaagtgcatattaagctaaatggtgctggtgggattacttgtgacaactactggcattcattagaattctttatgattgatgataaatatgatgtgttaagacaggcatacaatcacgctagtctagagtccattaagctcattcattcatgcacatgtgtattatttgtacattcattcgttcattcattcatcaaatgctcaatttatgcctacttcaggcaaggtctcacattagggagatgagggtgacactgggagatatggagatgaaacagaacatgctacctacctcctgaagggctcacaggctgctgagggacacaggtgaggaacagataacagagtagtgagaaattggagctttctgtgaaactggccctggggtggaatgggggttcctagggagatagtatgactcgtagacctggccaccgcagtcccctcctggaaggtgtgtgccgacccttctctgtactgactttccctggggagccacagctctgttggagaccacaagtttccccctgcctgcagaaccctctcctgacaggccttgacccagggggctggagtgcccaagcctctctacatccacttacctccaggggctgacttggacaggcttcctgctggccagccttcttctcccacagctggggccacttggctgcctcaccccaggccctaggacattcctgttttccatcagtgggatctagtgattcaggggacttagcatcccaacagcctggctgggaggtggcttgaatgctgtgctatgatcacagaaaagcgctgtctctaccatctagtactggggccctgcctgggttggtccatggtggaagcagttacaatcctgcccctgcaccctgtgcctgggtctctggcccctgcaccagacgtctgtgctgctggctgcctgctcttgtctccaggtccatgactgcccatgactggcctccattcaggtagtaggatgccatctttgcctcaacagcacagcagttctcaaactagggtgtgcatcagagacactagggggctggttaaaacacagggtgctgggcctcagcccagggtttctgattttgtaggtctggagtaggtctcgagaatctgcatctctaataagtccccagatactgctgctgctggtccagaaaccacactttgagaaccactggcgtcatggataagcagacgggctatggagtttgaacccaggttgtctgggtccaaaacctggcccagccacttgctagctgtgtgacctaatccctctgcacctcaacctcctcatctataaaaacaaaggtaataagaacaccctcctcactgttactgtgagtattggatgacccagtccaggcaactcacttgcaatcgtgcttggacacagcacacagtaagtaagcattcagtgaatgtgtgagtttcctagggctgcggtaacaaacgaccacaaactgagtggcttaaaacagtagtaacttatccttgtccagttctggaggcgagaagtgtgaagtggaggtgtgtgggctgggtggcactcctcctggggctctagcagggaatccattccttgccactttcagcttctggtgactgccagcaatccttggcttgtgtccacttcattttaatctttgcctctgtggccacattgcctcttcctcttctgtctgtcaaaccccctccatgtgtcttataagaacacctgtcattggatctagtgcccacccagataatgcaggatgatctttttatctcaagatccttaacttaattacatctcaaagactctaaatgtaatgaacatatttagaaatgaggacatggacatatcttttctggcggtcaccactgaacccactttagggaacacaggctattatcattattaagttgttccttcagctcctgcagttgggcctggcctatagcttcctgcctgggggcgggggcggggaaggaggagtaagctgactcccaggttccagcttctggtcagctgcactttattcaagacaacccattttcaggctggggcagagaattctgcctattaagctatactggctatgttatagcatttcagcatgttcagatttcattgatctgagaaaaaaacgccaatcccagccccccagactcctgtctggagccctttgtccatgttaattgttcctcataccctggcaagttgtacttggcaaagcattttctcattcaaaactctactggatcctcactgcagtctcatgagaaagattgtatcaccctattttgcagaagagaaaactgaggcccaggggaaaattgcacaaagctgcctttcatggcaattctaagcagtaatttatgggagagaaaagaaggctaatgtcactgataatactaactaccaccaccgctatgcttcattcatcgtgggcctttgcttggccctctgctcagtgttttatgtctattatctcaggtcattctcaaaactctctcctgaagtaggtagcattcctcttgcggatcgagaaactctggctcagagaagtgaagtatcttatccaaagttgcccatcttttaaatgcagagttgaggttgagtctttctccctaataccaggttgctcagagatccgtctcctagctctgaaaaaatgtcagggcagaccagaagagaacagtggctgcccagtggccagcaagactgtgggagaccccctctcgttgtcagcagagccccgctcctggtagctggtagggaggtgcccagtgttgatgcccccagccatagggagggagtcagggcaatgggaatagagaggcagatgggcccaaggtcactgagggctgggacaacaataagggtgtgcttcctggagtgggtcaggcttgggttgaagtgacattcctggagagcagcagagacagactcaatgcctcgcatcagacagatgagggcttaaaatctccagtctgggatttgatagctgggtgcccttgggcaagttatttaacttcccagtgcctcattccttcatctgtaaattgggaacaaaaagagtggggttgttgtgaagaagtcaggggctataattagcatcaactgggaagtttgtgcagcctccccatgcccaagccacacctgaaccagctcaatcaacatctttgggagtgaggcaagagcattagtagtttaaaaaaaaaaaaaaaaaagtctccccaggtgattctactgtgcagccagggttgagaaccaccgctatgcaagtaaagcacttcgtgcccaggacatagtaagggctccgtatacaggaactattgcccattcactcatgcacaaaacaaacatttattgagcacttacctatgccaggctctggattacatgccaggcatcacctgttcacagcagctgtctgaatttatttatgtactatttctagatagcttccaatagagggatcgtggaattcagtgctttgtgaagccaggaccccaagtccataattctagggagaaggttttactgacaacgaggaaaggagggaaatgcagaaaatgtacccaaatcagagaaaccaaaccctgtgtgtgggaagagcagtctgagctctctgagcccttaagggggtagcaggagaagacagtgtgggcttcagactttctgtgggctcctctgtaaatatctgcccctacaacaccccagcttccacagctgtgatgtggaagggctttcaatgattggtttgattgtttttagcctcagaactcttcattcaaatgagacttaatggaacccaaattattaaacaaatgaagtctgaattgcttgggtgtatgtatatgagtgtaggtgagtgtgtgtggatgtgggttagtgtgtgggacagggtctatgaataggttgtgagtgtgtgagtaggtaagtgtgtgcatgtgtcagtgtgtgagtttgtatgagtctagggtgagtgcgggtggaggtgcatgagtcggtgtatactggagtatataaacgtgtgtgtatttgtatatctatgtgttagtttgtgtggcgtgaaccttcgaaagtatgtgtatgagtgtgtgttatgagtatgtgaacctatgcgtgtgtatgagagagtggtaagaataacagatttgtactgtgtatttgtggatgtatccgtgtgtgcatgtgttcctgtgtgttagggggccaaggggcaggacttctgctaaggcctcctgtatcctcctccctttctcatccccagccctggaaaatactgcttgaaaccccctggtctatgtgtctacactggccctgccagcagtcctgtgtcgccttggaatgctgggcctgacggcttccaggagccatgggctgtagagcatccatgtccagcaggtcactgcatgctcccatcccatgcccctcacgtgcccctgacaggcccctttttctccgtgccattttccatgtgttttcctcccagagccctgagctgagccctccagagctgcctgccgggtgggggtgatgactcatttcagttgatgtcatcctcaggattcaaggctctcaatgcactcaaagagtctttgttccccaaatggaaaaggaaagtccgtacaccgagaagagctgacaacgaaactcttcccagatgcccatgggtgctcacgcctgcccgcacctgctggccttcactgtgccacctagtccacatggtccctggggtggctctgtgcccaggatccaggaaacagaggttgagggaagggggtaaaggaagggacgtaaagacccccactgcagcaagacagcaggaaccactgcttcttcctgagattggatatgctcttgcactgcggctaactgctgccaggactgaggggtccgcgtgtgtgcgcatgcacgtgggcatgtgtgaagggagcggtggtgagcagagctgggtcacaggataggggagtcaccccatgctctcagcagagccgggtcacaggatgggggagccaccccacgctctctctctctgggctgctctcctcagttccttatccgctgggcctgttcatcaattatgttgctaattctttcatggctagcaggtggttgtgaggctgaacggaggtgctgtactgacagcttgagagtgccccgccctggtcagcacccaacccaatgagcgaggactcccagtgtttaccaaatgctcactacacaccaggccctgtgcgaagtagggttctcactgtgttgtccgttctcacaatatctctgtgagccaggtcctagtgctgccccactttatagattaggaggctacagaggggcgaggtgatctgtggaaaggccatgagtggcagacccaggactaagcataggtctgtctgatgccaaagcccaggcagttagcccttacccgtggctgtcacttgagagtgggcatcagattgacgcaggcaagaccctgaaagactctgattccataggcccaagcaggaggggcagacctctgacttttaaaagctcccaggggtgactctgatatgtggctagggctgcaaacttcacaccagcctaccttacctagtcccatttgaatcttgactccaactgcttattaacctcatggatttggaacagtaatttaagcctcagttttctaacctgcaaatggggataataatatcatccatctcagaaagaatcaagtgtaaggatgactgatttgtggaaagccctttgaacagcacttggcatgcagcaagcctgcagaaaattttagctgctgatgctgttgtttcttgacattctgttcattcagagtcccctttgccaggctctgtgctggtgctgaggaccgagagatgagttggcatggtccatgcccagggcccatgtctaagcatatgagagcaaggtgaactggccactggactgcagacagatgagggtgtctgggaggaaggatggagggggactgagggaacacagaagtatgcagctgggcctgggagagccacaaggaaagcttgaaaggcaatgggctgtaacaggcagagcccagcttcacatcttcagtgctggctgctgcaccgaggattctgagtgagtgacttcctgtctctggggcttgactccctactctgcaaaatgagagaatgatccctgcgttgcctgcctcctggcagaaggaacgggtaagaggatgctttggaaacagaagaggatactggacaggtgaggattacttcctgctgggctaagtgcttttcagctgctggccaggaaaaccaagcttcagccaggaccccagctccaggcttcctcaaatcgtcttctccagtttaggtcagaggctcgagaaagcaagaacgagagaacaagagagcaagagagaaagagagagagggagagagagagagagagggaggagagcttatacagtaacttcattgaacaggaaaattcctatgctatatatgaaaaccggaaaagagaaggaggcgttctaagtttacatgtagaaaaatgctcttctgtaattcagaaaaatagggtctttgattgtggccgagccaggtctactttctaagttgatccaggattttttccctggcaaggaaacagttcttttttaagaaatgcatcgggtgataggtttttctaagaacctctcgcacctttgctgggtgcagataaaccctcaggcaccgtggattgtgttgtgttcattttcctcagaaagggagtcaggtggaaacgggagcccccagagactccagcctgggtggggctgagtttccacacaggcagagagctgtgacattttcctgagcacagtgctccttgcctctggccaggccttgctggctaaagacaaggaagtctgtggggagggctgggtttgtcccggcccctgttggagtcattccttccaggcctgaaggctgtggactgaaagaaccggcagttaggggcggttagaaaaactgaaacactggcgggagacaaggaggaggcagacgatgaggctgtcagacctggcaagggcctttggaaaatatttagtccaaggctctagtttgacagatattgaacctgaggctcagagaagggaagggactgctcaaagtcatatgccaagttggtggcagagtccaccttgcaggctgaggccctttccaccaccccatgcaacatctgagaggtcaggatgtagaagttgaggccgacttgtgtgtggtctcagaggggtagagagctaggcccagccaggtgggtgggagttgcaggggcggttgcctcagttcaacatgagaaaggacttccgaagacttcgaattgtgcagcaatggtcaggtggccgtgagtggagatgagcaggtggaagccaggtggctttggatgggtgagcattgtaggaagctcctccccaggtggtgagctgcactgtcccacacagtctgcggttgctgaactcctgtccctccagggaggtgggagaaagggaagtcacatgccagatgtgatttagacatacccagggtccttgggggccacctctctgtaggggtgtccaaagggaagggaaagaaccgtcccagaagatgcaagaaccccaccctcccaacttgctggcaggacaagctgacaaagggcaaggaggagggacacgtggcttctccgacggtctgccccccatgctgcaggcgcagaggagggggactgagcacctcctcttctccccagggactgagtgccaagaaactcaggtgagaggagcccttctggggtcccaagggcagtccccccaccttaccctacataccctcatcctactggtccagccccaggccacaggcagtatagggtcatctggaccccctcagccccggccccccagtgggaatacacccacccgcttgcaggagtcaccgtggccccgtttaagctgactgaagtgtgccgtcggtctttagaggcgtgtgtgggaatggtagaaacccaggaggggcaccttcagcctttcccagcactcggtgcagagaaacagcagaggagggaaaggaggcgttatgggttctaggcctggcttggccaaactcactgcatggcctcagacctgctctcttgggtcccttaacagacctttcgctttgagtctgttgttgggatcccggttcacagcgcaggtggaaagccttccttgcagttggtggaagcgcagttcccgtagagaccgccaggagccgctgccgcgcacggtcccggggcgtcctcagcctccctcgcgcctccgtccggacatatccgcagcgctccttcacctggagcgaggaacgctccttagcctcctctggctttaaatgctaactagcgctagcgctgggctcaggtcccagatgatcgtctgtgagagggagctttgcaaagccagctacagttctctagggaggcaaggctccaaagctcaggctagtcccgggcactgcttcaggaccccacagatggaaggactgatccagcccatcgcacggaaggggaaaccgaggcccagcggggtaggggaggtgccagatgatgtccctgagcctgtggcagagaggaggaggagaggtgagagttcgctcctgttcttcatctctggccaaatcgctgtcatctgtgtggaaggaaaacctgaaccctgctctgtttgtttcttcatggctgggattctgcctggtttccatggaaactggctttggacccttgggaggaaagtcgcaccctgccctgactgctcagattttcctctgcctcctctgtctctgaaaccgtctgatttctcctctctgcgccctgaggaggggccaccccaaaactgcacttaggagtctgaactagatttgagggagggaggctcaggttgtctctccctgtgtccgttccttcacagcatccccttggctctgtggatgtttagaggaggggggatgactttggccctttttgcagagtgagagtggggcccccgtgtgttggggtgcagctgagcctgactggaaagatttagatgtaagaagatggggaagagtgatgtcactagaaggaatagcatgagtgaaggcaaagacacggggggagaatgaggagatgaagcagagggtgtctcgagtagaattttgcttttatgctgaaggcactggggagccattgaaggctttggagcttgtaataggagcagatgactactaatggtcacctagatagtgagctgcttgagcacacatgttccaggcttagctccatgtctccagcactacacaaggcacaatgtgggagctttagaaatatgatcaaattcatgaattggaaaagtaagttgaaaacccccattggaaatgaagctatctctaagcattaatgaagtgagagaataagaccggtcagatgcagccccaggaagtgtttgaaggcagtgaaaatacatagaataaatcacagtggatgtggctctgagagtctatctggtctaactctctgatgggaaaactgagatcagggagggggactagctggcccaaggtcacagacagagtcttgaacctgagtccttcctcccctccctgggtctctcattgccccatggattcatgcctcccagatgggctctctgggccagtggatccagcatcgtggagatgggagggaacgtggactttcaggtgatggatgggcatgcagtgaggtcactgttggatgtcagactggagcccgacctcagtgactctcaccagggcctcagactgtgagcctggcaccttcaattcaggaatgcctaggatttagttcagccagcaaacacttcctgaggacctgctcagggacagagcctgggtgtgggggagacagggagaagtggacgccagttcctacacttaaggaggttccaagatggtagggtccaacaccttagtcatataatgccatatatgctacatagagtcagggccaagtgcaggagcgggaatgcccagactacctggtgggggaatccaagaagacttcatggaggaggtgatgacattgaagttgggccctgagatgtgtggagcagttcctcaagtggagggaacagcatacacaaaggctcaagggtgtaaaatgtaggacccattcaggataccttgagttttccagtatgacaattgcatgggaaatagcagggtaataataatagggaaagaaatggcagctaccatttattaagcactctgtgtgctaagcagtgtgctaaacattttaggtatattattttatttaagtcacacaactgtcctctgagagaagtattattatctggggataagtgtgggccgcttccaagaatcctcaggctgcagagttccatcagcatgctccacgccagtccccagtcccctccaaaatggtgggatgtcttcccaccagctgtgatctccaccctcctcccttcttgcccagcacagagccatccaaggtcaagcccatggacccagttgctgggcctgtttgtcttggctccctggcttctcctcccctccctggtggctgcctaaacaggtggccctcctgctggaggccaaagggaaatgagccagcaggcccaggcgcagccgcgagtgagcatgggtcactccaggtcaggggtcgtcccctaccacgccatgccatgggacagtggatgtggaaggatgtggtgggggttgctgagagcagagctgggctgctggggctgacttgggcttgctctacattcatggctggcctccctcttggcggactctgtggaaacaaggcctgcgggccagcgcctatccatgtgtcctgtcttgaatggctgaggtctagggggatggagggtgggagggttaggaagggatcttttttgcagactttggtttttgttaagcttataccttgcatttcccatctgtcgtctcattgaatccccacatgggaagtgggcagggacctcccctgatcaccaggaagtcatcgcccaaaggctttgtgtttggtaaagggcaaaggaggggtctcatcccagctgtgtccaaggaagaggatgttctccactgcaggctgcctcctttgccccctctccagctgaccaaccattggccaggacctggagtggtcggggctgtgggagggcaccagctctgggactcgtggtaccaagactctgtccacccttgcttggctgccccatctgttgcttcctggctgtgcctcctggccatggaagtctccctgaacatcaatttccctgtctagaaaacaaggatgttggatagattcatgaatttttgtttttaagcagactcctaggcataagaattcccagaattgccacatgcaagcctggatctactggccatgggaagcactaggctggtttaagcaatgagctttctgagtgggagcctctcaggcccttctccctgtgtcgcctgaacgcttaacctggccctggatccctcagagacaccacttggaaacaagccacaggatgtgaagctctggtgcttttactctctgtggcaccaggaattttccgagcagaaagaggcttccccctcctgttcccagcaggaaagagagaggaaatagaggaaaagctttttactggattggataagcgaagaagaaagcagagctctcagtagggtgtttgtggttttgttttgtttttgtctttaaaccgtggaggaaagaaaagaaatctcagtgggatgtgtggttttctttgtttcttttccttctttttttctttctttctgtacaaagataagctgtatctgagtgaggaaaagcaagaagaataggttttatgatttctataagtggatgcaaggagataatctctttaaaaatatgtagatgtctttacttttcataccatgtatatgctgtaaaatagaaaaaagtataaaaagatatccagtgaaaagcaagtctcccagcccccagccaccagcttccttccctggagacaaccactgccccgtttcttgtgtattcttctagagctattgtaatataccatatatatttaaatatatatggtatatttaatttgtattagtacatacatttccaactgatagcaattcacttctgcaccttattttgtctgtttttatatagtacatcttgattgtttcatattagtacttaaggaatcacatcttttgaaacgctgccttggatttcgttgtgtgaacctgtcatcatttattatattaatcattcccaaagatgggaattttaggtaaatttaaaccacgatgctgtgaatatttgtgtatgtactttatatttcacatatgtaactttatctgttaaaaaattcatagacgtatgactgctgggtcaacaagtacatgcacatttgccattttgataaatgttattaaattgcctcccaccacgttataacaatttatgctcctgccagtaacgcaggagaaggcctgctgccttaaacccttgccaacacagcgtattctggtctttgccaatctgatagggaaaatggtatcccttcgtaatcttaactcattctatcattatgaatgaggttgagtatttttcatatgtttaagattttaatttcttttactgtgtctagaattttctattctttgcccatttttcttttgggtattcatttactttgcatattagagaaatgagtttgttgctgtgatttttgtagcaaatatcagtcatttcatggttttggggttttctttgacattgcagggattatctttattattattattattatttattagttctatgcagaacatttttttctaagtggtcaaatttaaccaaatttaccaatcttttaactaaaattaatttctgttttaaagcaagttgtaaactggagaggataagcattcaattgagaatcaaatctgagttcatggccagcaaacacttcctctctattaaccttagtttagtgttttctaaaatgaggtgattggaggctgagcgcaggggctcacacctgtaatcccagcattttgggaggccgaggcaggagaatcactgattccaggagctcgagaccaacgtaggcaatatagcgagaccctgtctctacaaaaaaatgaaaaaattagctgagtgtgatgctgcatgcctgtagccccagacatttgggaggctgagaggtggaagggtcatttaagcctgggaggtggaggctgcagtgagctgtgatcatgccactgcattcccacctgggcaacagagcaagactcttgtctcaaaaaaaaaaaaagaggggacttgagaatatgtacacattcattcatttgttcattcattcactataagccctgggttggttactgggaagacagatggcccagtgggaagagaggcaagtgacccaatagtgacatgcaggggctatgatggaggaccccgtgtgtacagagaggacttctaatgcagcccccagaggggagggtgtgggtgcgggaggtgaagcgagatttcaggggaagcgaggcctgggctgatgagcaggagtcattcagtgaaaataactgggctgggctggggcagatggcacagaggaaagcattcctggcaggggtgggagtccctgggacagcatggggcacgctggggctgtgtcaggcatgtcagggagtagggagtgcagctgggtcctgaccacagagggcctcttgagccaggtggcagcagcctggtcagccctggccctgagggccatgaaaaatcctatttcatagaaggcttctaagcaggatagcaacaggatcagatgtgctcttttgtcgaggaggggttaatcgttttcataaaaattgtatgaaatattttccatgaaatttgctataaagaaaaatacaatgaatatttcttttgaataccacctgaacaattaacactatcactaccgttgaaaagccccgtggacctctcccaaattgcatctctctgcctcccctaaatgttggcaagaatatgctgctggtgggtctgcgacatgcatgacacggttgcttcagagaacaattttgcaatattcagggaagctgtaggtgcacatacccatattatccaataattccacttccagctgtggaattacctgcacaggtaagcaggaggagatgtgtataagggagtccgtggcagtatcatttgtaatattgatggaaacctcaccttccaccaacagaaatgtgaatcaacccattgtagcttatttataccatagagtactgttgtgaaaatataaggccaggccaggcgcggtggctcattcacgcctgtaatcccagcactttgggaggtcaaggtgggcggatcacctgaggtcaggagttcgagactagcctggccaacatggcgaaaccccgtctctactaaaagtacaaaaattagccaggcatggtggtgggcacctgaatcccagctactcaggaggctgaggcaagagaatcgcttgaacccaggagtcagagggtgcagtgagccgagattgtgccactgcactccagcctggtcaacaagagcgagactctgtctcaaaaaaaaagaaaagaaaatataagatcagagccacatgtatcaacagggataaatctaaaaaatacaatgctgagtgaaaaataaaagcaagtttcagaagaatgtgtgcatcatgccaccatttatatgaggtgtagaacacacaccatggttctacattctgttagaaacacgtatcgagtggacatacaaatgcgtgggagtgataaacaccaaattcacaagaatggctcctgccagagcatgggcagaggaaaaggactgaagagagttcatgggagcttcagctgaattgatactgtctttcttacgtggagtggtgggcacatacttgttcctcataatattataattattttttttagagacaggtctcactctgccacccaggctggagtgcagtggggtgatcatagctcactgtagcctcaaactcctaggcgcaagtgatcctcctggcccaacttccagagtagtagattacaggcacgcactaccacattctgctaatttttaaattttttgtagagatggtctctctgtgttgcccaggctggtctcaaactcctggcctcaagcaattttcctaccttggcctcctaaaacactggaattacaggcatgagccaccataccaggccctattttaaaattttaaaaaatgatatatatagagagagatagggtatttctttgttgcccaggctgaagtgcagtggcatgatcgtatttcattgcagcctcaaactcttgggttcaagtgattctatcacctcagcctcccgaatagctgggactacaggcacacatgaccacacccattaatgtataatgtattttatttatccattgtttttcaaaatgatttcaacatataatcaatataaatagtattgagatatttttccaagcaaagtctttgaaatttagtttgtagtttacatttatgacacatctcagttgggaagacccatttttcaagtgctcaatagccatatgtggctactggttatcaaatcagacagggcagggtctggtacgatagaaacttagaggtcaccagttacaacctgatacaactttatcaacagatagagttgtgtcaggtgacctctgcggttcttttctaaaccagcaagtctagatgacagtgatgacgatgatgatgatgatgatggctgccttttttctttttttttttagacagggtctcgctctgtcacccaggctggagtgcagtggcatgatcatggctcactgcagccttgatcacctgggctcaagcaatcctgccacctcaacctcctgggtagcggggactacaggtgcacaccacctggcttttttgttgttttgtggagatgaggtctcactatgttgcccaggctggccttgaactcctgggctcaagtgatctgcactccttggcctcccaaagtgttgggattacagttgtgagccacagtgtgtccagccatgatatccaccactttttaggcatttggcatgtgccagcactttgtattatgtcctttaatcctcacaacaacgctataggctaattactcgctttttttaaaattgtggttaagcatacatagcataaaatttggtattttaaccatttaacaaccaagtgtctcatattgttctttatactgtatttttttgtgtaacctagatattccataataattgaggttagtactggcggtgagcagccttctctgtgagtgttgcggagttgagatgggggcatggcagtcagggcatctccctctcccagccactaagtatacatacccattcatgggaagtttgagttcctggaccacctggagtcttgactccatccttcttgctgctgaagggtcattgatatagtaggcagactaggtggagccccacccgcaaccccggtacagactcccccatctcagtgaggctgcagcagtgaatcagccagaaatcacaccagccatggctcgaaaatgtcctgccacttaccagctgcataacctcgggccagtcatctcatcttcccaagggataagagcagttaattgccagggctgctgtgaggactgagtaaaactatgcatgaaaaccacattgttattattctttataagggagctcaagggcacagaggcaggctcccatgtcagcctcactttcctggtcagtgctgcaggcgtgattatccctgcgcattgacctcttgagattgttcagtggatataataaaaataaagaatagcgaatgtttgttgcactgctaccattattaaccaggggtttccgtggacggtctcatttagtcattcttttggagcccattctagtgcctgtatgatagaggaagacactcagacttggagtggttcagtgactcactggagttcacacagctacgtagttgtgtccaataagatggtggcaagttgggtaaactggaaatcaggctgattcctcaggtagggctttccttagagggtctctcgagtgtttggggttttctctggagacaaacccgccaagtcctcagaaaccacttaggttctcagtggcctctggcctttggcgatagcccagacagccatcaatcagtctgccttgccctctggcctccagaggaggacactgctcgattctgatcctcactcattccaggcctcctcatctggttgaatcctcaggatccggcttcacttccaaggccaaagggtgttacttgtccattgtcctggctacagtggtcttgtccccctctccctgggacttgccttcctgtctcactactggtaccttggatgtcaactcagaagtgggtgcatgttgctgcaagctagtctgcagctttctcctggggaaaatacttggatgggccaacattctggagcctgggggccttttcaggacaccataatggagctccaccatttctccctgcaaggtgtggtggcatagcctctggggtcagatgctctgggtttgaaacctgcatgcaacttaccttgagcaaatttgttaatttctctaagcctcagttttctcagaagtaagatggggataagagtacctaacctcataggtttgttgtgaggattacatgagctaatgtatgcagagcgcttagagcagggcctggtgcagacagagcttagggaatgtggatgatgatggcggtgatgtcaaaggcgatgacaatgacgcaaatttcaattgccttgaggcctgggaacacttcactgtgtccctgattttccctgcacactcagaggcacttaaacaatagacctcattcaaaacaaaacaaacctatccagtttttttgtttttgtttttttgagatggactctccctctgtcactgaggctggagtgctgtggtgcgatctcagctcactgcaaccaccacctccggggttcaagtgattctgctgcctcagtctcccaagtagctgagattgcaggcatgtgccagcatgcctggataatttttgtatttttagtagagacgaggtttcaccatgttggccatgttatcctcgaactcctgacctcaagtgatccacccacctgggcctcccaaaatgctgggattttaggcgtgagccaccatacctggcccctattcagttttatagtggggaaaaaaaaaatctccaagtcgatgggtgaacattatatattctagggattactcataagtgttttccaaacgcaggtcatgaactattagtgggttataaaatcaatttagtaattaattaccagcatgtttttaataaaatgaagcagaaaaagaataattaaatgaaaagaaaaatatttgagtgcctggtgagtattaaatcatgttctatgaaacttctgtttcagtgttacagatatctgtctacacgtgtgtatattgggttgcagtgcaaatgcatttctttttgtgggtcgttgtcaaaacgtttgaaaaacaaccatttaggaactacagtttcagtggggttcctgagtgatcccgtttcatttgtgactgcgtttcttcctcattttcaagcaaagtggaatatacctgtaaagcgtggcctctctctccctccctgcagagactgcttcccagggtcacctggacctcacgcagctcatcggtgtcccgctgccctcgtccgtatcctttgtcacaggctatggtggcttcccggcctacagtttcgggcctggtgccaatgttggccgcccagccaggactctcatcccatccaccttcttcagggacttcgccatcagcgtcgtggtgaagcccagcagcacccgtggtggcgtgctcttcgccatcactgacgccttccagaaggtcatctacctgggcctgcggctctcaggtgtggaggacggccaccagcggatcatcctctactacacggagccaggctcccatgtgtcccaagaggctgctgccttctcggtgcctgtgatgacccacaggtggaaccgcttcgccatgattgtccagggtgaggaagtgaccctcctcgtgaactgtgaggagcacagccgcatccccttccagcggtcctcccaggctttggcttttgagtccagcgctggaatcttcatgggcaatgcaggagctacagggctcgagagattcactgtgagttaaagtcccactccaggtagatcagggaggtggatgaacagactcgccatgcaataaatggagcaactattattgttattattttattcttatgtcctcaaagaagcatgcgtgttatgatgggaaataacactaggcctggaaccccaaaacctagatttccatcctcagttttcaacttaccttgtaaatttgagacagttatccagattctctgatcctctctgtgtttccttatctgtaagtggagataagaaaacctaccccacagtcttgtaggtcaaataagataatctgtgtgaaagcactttgtacgttttaagattttatataaaagagcaaggtttgttatagccctaaatggtttgatctttggatatgggtgacaattgcacgtaagtaatttctgaaaaggtgggatacactagaataccagagtgagaggtagcttttcccgccttctaggcaatgtgcacttaaaaaaaatttaaactgactttactatcaaaatgggcttttatgaataaggcattctaaagatcactaagttattgtagttactcatttagtcagcacacgtatttactgatgtctcgttggtgaacaggacagcaccacggggtggagtttgggtttatctggagtagagtgaaagacattggagaatgttaagaagttaaaacacaaagggcaatttttaaatgctcactttaggagcctcatggagaggaagctgtcaggtgtggggagaggggaggagagtggaggcagggaggctgtggtagcccttcttgggacgaggccttcaaactcagaagcattgagctgcaggggaaagagctttctgggagagggagatgtgcgtttcagggcctgccgctgacaagctggggacctggagacaggaggctgctgtggtgtgcacacttgaacacaatgctccccaagggcctctctggcccaggggtcagtatgatactggcccaaggagagtccccccataactgagagtgggccaagaggtggcctggcttcgtggttgagactgcaggctgtacatcctcattcccacgcttttacctgttcgtctccattgccaaaacaatcatgtcttccactggcagtcatgctgtgtacgtgcaaaccgtggcttctgatccgtctcttttccccagggctccctccagcagctcaccgtgcaccccgaccccaggactcccgaggagctgtgtgaccctgaagagtcctcggtgagctcccctactatcccacagtgggccctgcaaccccagcagccgcagcctggggagggctggatgcccagacagtggcgtggagtttctgaaacctctcattttggcaactgctgcctcaagtcctattttgggcttttggcgtgatttcactttttaaagagcatcagccatctctggtgtggggagctgtgtttcttataaggtgtcaggatcttccatggctgtggccgtcaatggcctgctttcccgccttcttgccaagaaatggtgtcaagattctaaaatcaaagttaaaactgagatattctgggagtaaattcctataaaaaacgatcctcaacttagcttttatgcttggcaaatgagttcgttcctaagctggggatggagtggtgggcaggaaaaaaaagatgactccttcttccctccctctaaggattgactgagcacctgctgggtgccagccctgggtaggtgctggagataaaggaataactgggaactgtttaataagctgctcatatgcacttccatacccaaatacagtggcagagctgagtgtgatgggaaaagggggagatcctcaaacccaaactcaacgtgtcaggtgggagcaggagaggaaagaggaggaacttgaagccagttagggagcaggtgatgcctgaccaatgacaagggtgaggcctcccagggagaaggggtccaggatgcagtcagaggtgagcagaaggtagcgcattcctgcaattcctgttgccttttgggtggcatcaacgtcacaacagaacataaattgattttgttaactttgtaaaaaacaaaatgctgtcgatttcgttggaaagcccctgagaggtggaatttgggcctgtgagaatgcctgtgttccatgagccagtggtcccagcctgacagtcatgtgatgctgatcagtgtagtcacgcgttagtctctgcattgccattaatactgaaaaagtagaaacaacccaagggtccaagaacaagggattggttacaaaatcacagcactcgggctccttgtctgcctttaggaggctaattagaaagattaggtaatgccaggaagtcatgcttcggctgtaattgttcccagcgcaagattccaatgacagcctcacaaaggttgggagagtggtggggacctggatcgaatgaaagtagatatgttagagagagtgagaaatcattgtgtattctgttagagcaataaaatgtggaaagaaataaaatgaacaaccaggctgggcgcagtagctcacgcctgtaatcccagcactttgggaggccgaggtgggtggatcacttgcggtcaggagttggagaccagcctggccaacatggtgaaaccccatctctacaaaaaatacaaaaattagcccggcgtggtggcgtgtgcttgtaatcccagctactcgtgaggctgcggcaggagaatcgtttgaacccaggaggcagagtttgcagtgagctgagatcgcaccactgcactccagcatgggtgacagagtaagagagaacctgtctcaaaaaaataaaaaaataaaaataaataaataaaacaaataaccaaccatgcacactgcacacacgctgtctccttaaccccactccgtctctcatagacacacacacacacacacacacacacacacacacacacacacggtttccctgtaggagagtcggtttgtcagtttctgtaactttcccagtcatccaactcttatgggccctgcccgctctgcccggtgtgtggcacagtttgtctccacacaggcatctggagagaccagtgggctgcaggaggcagacggagtagctgagatcttagaagccgtcacctacactcaagcctcggtgagtactgggatgctgtgccatgtgatcttgctcagcttttagcaggctgagaattactagagggggcccagagtcctgggtctgacctctttgtttccagacctgtgagcttaatcgttgactcatctgggggggtcaggaaaataatggccaatgggcactttgcaaaatcccctggtgaaccgcaacaccagcttcctcagtgccaccctgtgtgtggccatcagagggctgtcaagggcaaacgctgtgctgtattgctttggagccttgggtaaaaagcctgtggccttaggtaacttactcaaccattctgaacctcaactcctcttccaagaatggtgattctaatagccctatctcatagggttgtttccagggttagatgatgaagtgcagggacaagcctcagcccagcatctggcatgagggaaatggccctgaacgatggctcttgttatatttgctcagtgctccagctgtgaaagcacagtcaggaccccagtcttgtgagtcacagagtcctccagggagctcacttctgacgcatgggaaaggcaatcctaacttccagtggcctggacctcctccctcctgggaatgctccctgtggctgagacatggaagtggttttgaaagcactgagtcagactgtggggacacccaggagcctgtttttaatgaaaacagcaagcagcagcagagtcactaaatacagcagagcttcagccgtctccttgcctggtcgggctactttgtaaacgtatctctaatagaagaaatcagggagatggaaattaggcagtggctggagattacagaccttgggcagcagggctgtgcatgcagcagagctgtggatgcagcagaatagaactagactctgttagcactggaaggacccaaagtcctgtacatctctttctgtacagaggtgtacggaaaactgccctttgtgtacaaactgagcaaaccaaggcccagataggggaagacactgactgaagggtgtatgggccggactggggtaacagcatgagtctcctgatgcccatccatggggtcatggcctgagtggtattgcaaaagtccatcccaaggatggcggccaactcttggccagttgggatgaatgaagtcaagggtccaagttgcctgcctacctggtgattggggagggcaactgctttgggtggtgtggctatcctgtgtgcccatcagcccttggccatcccacaggcatgtcccaacctggggcagtaggacacagagtggccttcacatctgatgctgccctgtgcaccagttcacaattcacagcgaagccaactcaggcaaaggtgccaacagcccaaggttgcccttagagagggacaggaaaggagagtggagtttgagcctgagatgatcacaggggacagaagtagggcagagaagcttgggagggggcaccagagctgggcagctttggacagagatagagaagtgggaggggaaggaagagaactggcatttcttgataccactgtgtacctggtgctattgtgtctggaattggtgggttcttggtctcaccgacttcaagaatgaaaccacggaccctcgcggtgagtgttacagttcttaaaggtagtgtgtctggagtttgttccttctgatatttggatgtgttcagagtttcttccttctggtgggttcctggtctcgctgtcttcaagagtaaagctgcagaccttcgcggtgagtgttacaactcttagggcagtgcctctggagttgtttgttcctcccggtgggttcatggtcttgctggcctcaggagtgaagctgcagacccaccccatgagtgttacagctcataaagtcagtgcggacccaaagacactaacagcgatatttattgcaaagagcaaaagaacaaagcttccacaatgggaaaaggacctcaccaagttgccgctgctcgctcaggcagcctgcttttgttcccttatctgaccccccccacatcctgctgattggcccattttacagagagctaattggtccactttacagagagctgattggtccgttttacagagagctgattggtccattttgacagggtgctcattggtgcgtttacaatccctgagctagacacagagtgctgattggtgcatttacaatcctctagctagacacaaaagttctccaagtccccactagattagctagacacagagcactgattggtgcatttacaaaccttgagctagatacagagtgctgattggtgcatttataatcctctagctagacataaaagttctccaagtccccactagattagctagacacagagcactaattggtgcgtttacaaaccttgagctagatacagagtgccgattgatgcatttacaatcctctagctagacataaaagttctccaagtccccactagattagctagacacagagaactaattggtgcgtttacaaaccttgagctagacacagagtgttgattggtgtgtttacaaaccttgagctagacacagagtgttgattggtgtgtttacaaaccttgagctagacacaagagtgctgattggtgtatttacaatcctttagctagacataaaagttctccaagtccccactagattagctagacacagagcactgattggtgcatttacaaaccttgagctagacacagggtgctgattggtgtgtttacaatcctttagctagacataaaagttctccaagtccccacccaactcaggagtccagctggcttcgcctagtggatcccgcacgagggcagcaggtggagcggcctgccagtcccacgctgcctcctcagcccttggatggtcgatgggaacagccgccgcagagcagggggcggtccccgtcagggaggcttgggccatgtgggagcccactgccagggggctcgggcatggcaggctgcaggtcccaagccctgccctgcgggaaggcggctgaggcccagtgagaattcgagagcagtgcgggccggtcggcagtgctgggggacccggcacaccctctgcagctgctggcctgggtgctaagcccctcactgcccagggtcggtggcaccggctggccgcttagagtgcggggcccgccgagcccacgcctacttggaactctcactggcccgcaagcgctgcacgcagccctggttcctgcccacacgtctctctccacacctccccacaagcagagggagccggcttcagcctctgccaacccagagaggggctcccacagtgcagtggtgggctgaagggctcctcaggtgtggccagagtggacgccaaggccgaggaggcactgagggcgagcgagggccgccagcacgttgtcaattctcgctattgtatgcatgatttcacttttgtttcttgccaccctgcaaggtaggtggcatcagccccattgtgcagattcaaaaatgaatgcccaggaggtggggtgcctcttccagggtcacagggtagtgaagtcaggactcaagccaggcctcactccccaggcttggaccctccccaggaccatggcactgcaggcactggggcagatgtggggcacgtgtcagccaaggggggctatgaaatcaatccccagactatctggaaaagtgaaaaagaaaaagttgttggtgatttgatggacttggtggcctctggggaacctctaacactttctttccatgcttccccaacccaacttttctcagtggttttatgggaactggtgcatatcagagttccaccaagcgtgaatcccagctctgccacttactagctcttgaccttgagcaagtgacttaagctctccaaggctcagtttcctccttggttacaatagagtggacctgcctcatagggtcagtgtgaaaattagacaaattgccctgtgcaaaatgcttggacagtgcctgttgttgctactgttgaccagtgggtttgttgtgaggattaagggaggtgatgtgatgtgtcagagagcagctcagtgctggactcagcaccgggcatagtacagatgcctcgttcctcttggggcctcctggttggccagtggcttgggctgacaggcatgccaaacccctgtggctgccttcagttattaaggggattgccctgggctgtgcctcgaggcctgatggtcctgaccttaacctgtctgttcctgatcatcagaatgccttccctgtgcacccgtctgtctgcaccacagttcacgctcttccacatgcttccatttcctttagtctcatttgcagggaggtgtttggggtctcttctacataggagggcactgaggccatggagatggttgctggaggcacccagcctggaggtggcagagccaggtctccagctcagggtccagagtgcactcagtcatgccacccctgagctggggacttcccccttttaacatctcctggaagggctttatggcattttccggcagccaccctctaggacggggaatttccctcttcagctcagacagtccccgcccgccccttgtctgtctaacttctttcttggaatgaatctcacttccccatcctcagcctttccagcctgccaccctttgagacatgagccgtcgccagtgaactgaattgcagactttctgagtggtcagggactacaaagtctgcccctccttgccttcttccccatttaggattggggtccttgctatccaattctttgcattttcagaaagttctatgctgttggaattaacatccctgtggttctcagccctggctgtgcatcagggtcatttgtgtgtaagtgtgtgttgggggtgggggtggcatggggggttggggaggcactgtgttggggggattggtctttaaaagcagattcttgcctgggctgtagacctggatgttcagcttcagtagatctggagtgaaagatcctagaatctgtattgacaaaaagctctgcaggtgattctggtcctcagccagggcctctttcccaaccacacccagatgctcacagttctctggacagaccgagcactttctcccctccatggcgccttagttcctgcggttctgtttgcctggagggcccctcccagctcccatttctgcctggcaagttcctacttagccttcaggatccagtccacatcctctccttggaggccattatttagctaagccccctcctcgcacttggctctcactcacgccatcccatgcatcactccgaatcatggtttgttgcgtctggtctaggtctggggatcctccatcacctgacagcttgaggacagacacgctgtcttagttattcatttctgtgtccccagggctcagccaaggacctagcacacggtagggcctctggaaatatgtgcagaatgagtaaatctgattgtgtggacgtgagcctggactcagcaaattgcaacacttttaatagcaagtcttcagacttgaggttcctattttgtcacaggccacactggatccccattcacattgacctctgaaaaccaaagccacctatttgaggcaggtccccttaccctcactcctgagggtcaattcaccagaaccatgccctgtccttgcaggggggttgggatgccttgttgggagtttgacaacttcagccaccctgagttacagagctcagcccccatctcgttgtcttcctatgtttcctgaaccctcacctgccctgcccgcctcatcccaaagtccaaatgccttatagagcacctttgctaccagccaccagcagcctcactccagactagagatgagcattcaggggcttgagcattggttcctgaacaagtgatggagtggcttctgccttgatccctcacagggagaggagaggaacctcctgggcaggggtctttatcttccctgctagatgaacatccatctgggtgaaatggagacatcccacctggtcttgttcacaacctcccctggggaggtgcctgctgtctgctcccactgctgccctggttcctgtcttgtggacttctttactgccaccccccagtcacctggcgtaagcctcagctcccctagtccatgatcacactgccaccagcgaggactctctaaaacacacagctgcccccaccactccctctcccgatgctccccagtggctgcctgtggcccttgggttcaagcccattcttctccccacagaaccagctcctccctctgcctgcctccctgggctctgttccactgcttccctcctcaagccctgggctcttgccaagctcaagttgccaggccctgactttcatcaaccctccacccctgtgttctgaaaccctgctcattctccaaggcccaactccttaaagcctttcctcccacctccaccctgaagattttacagtacaatagaatccatggtgattgtctctgggtgttaggactcaaggtgatttctctttttgctcatctgtacttacagtgttttcaataacaaatatggaatatttatgtactaaatataaaggtgtgcttagcccttccatgcattttctatttcctgccttcaagtagttctttattgtcctcatttttacagaggaggaagctgaggttcagtgaagctccatgacttgcccaacataactaagcttataagtggagagctgggatttgatccaggtctgactgtaagaaatgaactattaaattctaaatgatggggcttccaagaatcctccttgttccatggaccagaaattttttgatttactagattctgaattaaggaaataaccttctgttattagtcaggaaaggtaagtgatgctgcagtaacaaattaacctcaaaaatcttagtgccttacaaaacaaagattggtttcttgttcataccacgagttcaacactgattcacaggattcttccatgcacccccagcccctttagcttagaaagtgatgaggctatctgaatgctgacaagcgctgggtcccgcgagctgctgcttgggtccaggggtgatgctgtgacttttggagcccatgctaggatttctgcgtagatcactgaagcactctgtgtttctgttggggttttgtttgtttgcttttctctagttggtaatgttggttaagacactgactggctttggaaaagctatatagatgctgaagtttcctcggaaggaaccacacccgtctttcattttcataggtgttttcatatctggcattgaatttatatgcagtttattgagtgcagcctggttcattcatttgttcactaattcattcaatcattccctcctctaacagatctttactgggcacctcctctggctgacctgggatttgggaatcacagaaatgtggtccctgtgctcagagagctttggctgagatgaatagtctcactgtcaagtgaacagaatctaatgacctctagtaggcacctctttcaggccctgggaggtgcagccattgcccaggtagacaccaagtggggccaagctttccccttggtttattcagcatcttgtggatatattattttcttcagtgatattctctgtcatttcttctgctttactgccaagtaaatcattttgcatctcatttttcctcccttcagcccaaagaagcaaaagttgaacccataaacacacctccaactccatcctccccctttgaagacatggaactttctggtgaacctgtacccgaggggaccctggaaaccaccaacatgagcatcatccagcacagcagccccaaacaaggcaagtccggatgcacatgcctacgtagtggccttttattgggtgattactatgtgtccagccggggccatgtatgtaacatacagaatctcatttaaccttcccctcaaccctttaagaaagggtgagaaccaccctcattttacagacaagaggaggaaattgagccacagagaagttaagtaacccagccaggagcaaacagcttgtgaatggcagagctggcatttgagctcagatagcagatcttctaacccccagatctggagcttctaactcccagattctattccttctggggtttaacagaaaagtttgtaataatccttgctctttgttgaatacctacagtgtgccaagtgtttggatattttgtctccaacaccgacagcataccgcctactcagtagcactagccactattttataggtggaaaaaccaacacttggaagagctaagtccagagtccccacccattctgacttttgccacaaactccccaactctcagaggatcagctaaactcctgtgtggcacaagtgagaaactgatggccagagaggggccagttacccagcaaggcagcagcagtccctaggagaagagctggtcccctggctgcccatccagggctctggcccctgcctcttgtccccctacctgtgcagaggagcactggtaaaagcccaggcgtcaaacactatcccccaggcactagcttggcatatgcccaagccctgagatcgcttgtggtttctgtcatttctcagaggggccgtcacttcagactgaagatgtaagtacaagatcattcctggcagcactgttcttaggaacaaaaataacccaaactgcccacagtagggattggtcggccaaattctatttcattcatacatacagccctgacactggtgatacagaagatttaatgacccagggacatgctcgtggtatattccaccaaaaaagcaaattccaaaattatgtctatgaccctaattttgaatatatgttatttatatctatttacatatagctatgtagagcgatgtgtgtgtattagatacatcacatattagacgtaatattcatcaaaatgttataagcagttatctctgagtggtaggattatggatggtttttactttttttattgtacttccgtattttattaatacaagtcttctacaataatacatatcactattctttttgcttctgccatcagttaatgagtgttattttaacaactaaatttggggagtctgtgggtcagagaaagtatagagaactggagagaaaaaattgtaggataatttaataacgtcatgacagagccaaggaggcagggtgttgctgtggaaatactgcccgctggggagagtcagacagcttggaaggaggccctgcctagccccctatttgctgtcggcctggggcaagttgctgatcagtttccaagcttcagattccttagccgtcctctgggagcatgaacaatccccgatgctgggtggatgagagggctgaatctggccgcagttgtggaagtggcttctgaattgcgaatgcttttctcaggggtggaattaggatctctcagcaaggggttaaggtgaaggggctggggcgagggctttcctagactgagaagatgaggtccacgtggggactgggctctgatcccaacgcagctcgcctgttcccgggatcagccacactccttatctagcagacaaaaggtcagttgaaagcaatggagctagccaaagtgtccttttcttcttgatgtgtagacagcccggatggtgggagaaagccctggctaagcaaagcccctaatatttgcattcagagcttccctgacaccatcgtgacccgtggaaggggccaccccacctccttcttcccaggggtcagtccttggaggacaggcaatcggctgcttgcacggcaccccctggtggtcagagcagggaagacgagagtgctcgacccgtgctggccactcttccatcacaggatgggacaggagtgggtggggaggggggcagagtcctttggaggatttggcacctcttccagagttattgtgaccatgggacctgcgtgagcacagcgtgtgtgggaagggcctggcccggggacaggctgacctggcttcagggcccttcccagtctcagtctcattcccagggttaataatactgaggtattgatgtgtggatccggcaggtcacacctgtcatggggtgatagtgggatccccaaccaggatctgcccacctgcaggaaggtggtgggaggggtcccggtgggcaggacaggtgggccagcaggagggttgctggagggagtgcatgggacaatcttggcatgggcccagccataacaggcgtgcagtcatggtagtacaacttctttttcttcttcttcttcttctttttttttttttttagacagggtcttgctctgtcacccaggctggagcacagtggcacaatcatggctcactgcagccttgacctcccaggcatgagctccctccttaggctcctgagcagctgggtctacagccacatgccacaatgcctggctatttttttttatttttagtagagatggggtctcgctatgttgccaagactggtcatgaactcctgagctcaaatgatcctcctgccttggcctcccaaaatactgggattacaggcatgagccaccatgcccggccaatgaataagttttctttgcttcaaaaatccatttgcgtttttttttttttttgagatggaatctcactctgtcacccaggctggagtgcagtggcacaatctcagcttactacaacctctgcccactgcaacctctgcctcctgggttcaagtgattctcctgccttggcctcccaagtagctggggttacaggcatgtggaatcacacctggctaatttttgtatttttagtagagatggggtttcaccatgttggccaggctggtcttgaactcctgacctcaagtgatctgcccacctcggcctcccaaagtgctgggattccgggctgctttttaaattgcaaaagaaatatatgcatgtgggaacaattaaattaatgctcagttgtataaaccagaaaaataatagtttcctcttcttacactcctatcttctggaaaatatcagtactaaacactgtggtttagccaagtatataaatatataagcacatacatatacatatacatatacatatatgtatatattatgtatgtcataatcattattacataacatgaatatgttatatatataataatgatacgatatctatactcatactttttttttctattttacacacgtaaaaccatatcaacaatgaacatttatcaattgcttactatatgccaggggctgtcctcaatgctttatttgcattaacttacttagtccttgtgacacacagtactcaaaacaaccctatgaggtaggaattattgtaattccccatttctagataaggaacttgaggcagaagttgagcgacttgcctgcaggtggtgccagagcctggaatggaaaccacacatgctttgccatgtatgttgttctgcaacttgttttttccccctcttgaccctgtgtcatggtatctgaacatctttccaagttagctggtgaagagatacctcattcttttccaagactgcaaaatgtagttattgatagcagaatgcctgcttcctgtagggtctggtgagatcctgaatgacacactggagggggttcattctgtggatggtgaccccattactgacagcggctcaggggctggggccttccttgacattgctgaagaaaaggtgagtagatggtaaatttcatttgattagtcagtagtaggcttgtttgcttatttcaaacttggtgatgattttactgagcaccagagagaaccacaagggttttggttgaatagcatcaagattgcttctgtcctcatggtacagaggaggtcagagtcccagggccacagaggctctccagggatgcacaggactggtgggggatatgcagtgcaagcttgtcctcacacttgcctgtgatgagcgagcgtccaggcctcaccaatgcaaccccgccctcctgctcagttgtgaaggcacatagctttatcagccctttgagtccccttcaagacagaatcagattaactgcaggtgtgttcatgctattgtttggtaattggcttttacacctgcaaagccagtttttgaaatgctgggctccctagggtgcaaaattaaagcataaatagttttctcacaatggcccctgctgaaaacccacaacgccagctcattccttcccttctcctgggatgaaaacttaagacagttctcacagctctctcagtcactatctggtaacagtcaattttcacagatatttaaaagtcaagcccagcataatatcaaaaattcaacaaaattacaaacacagtttccccccttctatactcaggcctactgtagactaggaaactgccaggaaagggaagcatggttaggggtttcctctctattttcttacttctctctcctccttatcctcatgatctccccatcctctagagctatttttaacatctgcaggggctggcccacctggagaaatggacacagttgtacttggctggtcaaattgtgatctgggcttttggtgtggaagatgcctgattgttggaactctctcttatgggggcttttgtggttcctgggaggtcttcctgcaggggacctaggatcaaaattccatagtttgccttgtaacttctgcccaggcttccaccccatacaggttgcccagatcttctgcgtggctctttgagtacagcccatttcagccagctccctttggagagattttatcttgtctatctccagcaaaacaactgcaggacaaatacccctcccttctccatccccctcccctcctctcccctttccctctcacctcctccttccctcctctctccttttattccctcccttcctctcctctcctctcctctccccttttctcccctcccctcctcttcccacttccctccttttctctttctccctcacctccccctcctctcctctccccttcccctctcttcctttgtccctctctcccaactctgaatctaaagggctccctcctttcaccttttgtctccctggagaaaatcagacaccagtccctgagcctcccaaattccaggaaatacatacccagctcaccaaatggtttggagtgagtagaggggaggagaagaaccgcagtacactgaaaattctttccaaaggaattcttgctctccaggcactcaaccccaaaatgagtcctgtatggtttcttacacagcctagaggtaggagatgggcaggagctggtagaacgggtgccatttccttgttttagcatggggagattacctgatgcctgtgaaattgcacttgccctttggggctttagctgacgctgagttagaaagagtctcattttaacatcctgggacctcaactttcctctaactgttttttgagacagtaattctgcaaggatttaatatattttatgaaaaaggggctctgtggtcaaatgactttgggaaatgctgcactctacattcctctttttatagattctgagaaatcctgcagcaaggaaatctttttaactttgattagcctggtgttttttgtaaccaaaagaaccacatttttgcaataaataaacaagctttgggaaatgaagatagaacatagtttgctgtcaccagccccaaagctgctctctctttccatttctcccattgctatgaaaccttcagagaatctgcctgtgcattcccaaaggaaactgagtcacagggagagagaagaagcaggaatgtctctgtctcccagcctagagaaggctgaggaggacagaggtgctgcctacacatttctgaagcatcttcatgggcaaagacattgtctaatgccttctggatgggtacatggggaggtcacagggaggcaatgggtttcagtagaagtatctagagctagaccaggctgactcaggagcagtgatttccgtgttaatggaggtgcaaaccaatactgggaatcaaacaccagacataggtgcctgggcagtctttcccatccctggatttatgaaaccatagatgtgaaagtccttgagagaaagaagctacagaaatgcaggtggctggagaaggctaggcagtctgttctcaccagccacaggcatgttgatgggagcccagagacatggtctcttgtgatgcctttgttttcagaatttagcagcaacagcagcggggctggccgaggtgcccatcagcactgctggagaagcagaggccagcagtgtgcccaccgggggaccaaccctctctatgtccacggagaacccagaggaaggggtcactccagtaagtagctcagagcgcaagctccccttcacctgtgtctggggttgtgggttgtgttgggtgggagcagtcactggctttccctatgtgtctgtgaaacacagtgacagtctcatgggggcagtctgtcggagtaagcactaaatagcattgacccattcagtggcggtgtgcagagccctacactgtgctgggcactaggcctggtttcagggatggatagtaaataggatagacgtgattcctgaagacagggtggtaagaggggctgtggtcagtggtaggtgaagcacaggatgccctgggagcactgaaaaaggggcccagagcccagactcgggggcacagaagtttcctggggaaaggatgctgaaggcgggcctgagagggtaagtagaagtcgcctagcagagggggtggaacaggtgtttcagcaaggtgggctggcaggagcaaaggcctgaagcctgaagaagggcagcatacctgtggggtcaagcgtgagccaggggtcggggagaaatggctggagaggctctaaggacacagagaagattcagcagaagtggggagtcactgaagggtaagaaacaaggaatggatgtagccagattagaattccagaaagatcactctgactactgagaggagaaagggtggggaagcaaacttggagaaagaggccgggcttgggggctgtgttggagtttgggtgagtggtggtgccagcctgccctgggatgtggccaacaatgtcagatcctcccagaagtcccagtgagcaaggggctgagaaacatccattgaatttgtccattcacggtgagtggccttggggagagcagcttcagggctatcggagcggtggaagccagatggcactgggctaggaagagagtgggacagggagtggtccacgagggtagactactgcttcaacaagaaagctgtggagtctgaggacctagacttttgtttcaacacagtgacttaagcaccagtagaagctgcactctctgattaggggacacagcttggaagggctattggtgagcacatgcccctcggggttggcagggagtggctggtggcacaccacacgggtgggatgctggggtggtctcgcagcatgagtggtgtgaggaaccaggcttccatatttctgtctgatgtctcactgtgggtttccatgtgaagtgaggtcttggtgtgcaggtgctttgaggggccctggccttctgttccttaccacagtgtggtggatcagcatcatggggcactgacgcggttcctgttgactttctattcagggtccagataatgaagagcgtttagcagcaacagcagcaggggaggccgaggcactcgccagcatgcctggggaagtggaggccagtggtgtggcccccggggagctggacctctccatgtccgcccagagcctcggggaagaggccactgtggtaaggatcgtacagtgcccaaaggttgaggtcatggtgggagcagctcctgaccttctcagagtgtggggctcctgctcagcaaacccatgggagcctgaggcacggggatctctgaccaaatactcacttgggggtggagtttgccaaggcctgggtgagtgtggtgaagcccctggaggtcagtgagcagctgggccctggggatgggtgagttgcagaggtggggtttgtcccaaggctgcatgcaggaccctgctgcctccacccacagggggtgggagccagaatggaggagtggcgggctcctggagggcgatgggggatcaggcagcaggcggcaggccccagcaagggtcagagggcacggccaggccttcctagccctctcctcgtgcagcgcacagacactgtccagctcctgaaggcagggcacatcatcccaaggcacttggccagtctgtccctgtgctgtctctactatgggtgccctcaagttcttccagctcagctgattcaaacctgaactcctcctttccactcctcctatgttcccacctcaaatgaatgggaccatcatcctccagtcacctaatccagaattttcttctctcttccttaagttctatatcccatcaagcatcaagtcttgttgatttttctgcccaaacacatcatgaatcgccggctctgtcctcctccaatgctggcccctgtgctgagcctgccgtgtccccagcccgggcaattgctaagagccctgtctggcctcctccatcctctcacagcttgtctccagtctttcagccccacttcttggaagcttcccatcgcccttccctgcagacccagctcccatacctggcctgagagcccttgcagggtctggcctacctagccttgctgaccacctcttgggcccgtcctctctgcctctcagcagcacttcagccacactgacctttttctagtttctccatcatgcctctcttcctcatacctcttccctcatcatgcctcataccctcttctctctgctgagaacctttctcccttctctcctccttttaattctagcttatcctttagaattcagctcaaacaccacttcctcaagaagatgtcattccagactgtgaactctccccattcttgtcctcaaaaggcctcatcatcattgtagttgataatgaacttggcaaatagttcatgtctggctccctaccagaatgtaagctctgctagaacagagattactgatacaatattttgttcattgacatacttcattcctgaccaatgataggcactgaatgagtatctgctgagtgagtgaatggctggggtcatcaggacatcacagatcaacaacgccggcctttgatgtcattgcacacacttgtgcccctggtctgtctgtgctggtcaggcagccttcagccttttagcatccatgctgggagaccttgcagtgtggctgggggtggaggtgggggacatgcactgatggtgccacaggccactgggcagttatatggattctttcagtgaacaaagtggctgtctccttctccttcttcttcctcttccagttgccctttcctttctcctcctcttcttctccacctcccctccctttccctgtcttcccctttctttaatgtctaggcacttacgacagagtgggaaagccagggatcaggttctaccaagtcctagcttaatagaaactagaatttgaccagcagggttgtctgaagatagaagggctatctgtagaggtggtgaggtcctagttactggaggtgtatcagctgtaaagcaaagagtatttgaaacaagtctcagtcaattttggaagtttattttgccagggttaaggatgcacctgtgacacagcctcaggaggtcctgacaacatgtgcccaaggtggttggggcacagcttggttttgtgcattttagggagacatgagacatcaatcaatatatgtaaggtgtacattggttcggtccagaaaagcaggacaactcaaagtagggagggggcttccatgtcataggtagataagagacaaacgcttgcattctttcaagtttctgattagcctttccaaaggaagcaatcagatatgcatttatctcagtgagcagagggatgactttgagttctgtctgtcctttgtctgtaaggaatttccttaaggacaaattgtgagggaggtatgtacctttcttatcttagtagataccttttaaaggaatagcatgggaggccgttttgccctaagcaatttccattttcatttttccctttggcttagtgattttgggggtcctgagatttattttcctttcacatttccccctttttaaaatctttcagataaagcattttaaagaaaatgagtctctagtttcaggtttagttgatttctcatggctaggagggtttattcctagacaggtaggtcccatgttattaggaaagttcacttttatcaggctgtgaagtctcatgccctacaagagaaaatagcgggagggagaaaaacaacaaataaaaaaagaagaacaatcctggaaaattgatataggtcatattactctgaagtccatacatcagtaggcaggtatgaaagtggcttattatgtaaataggttgctgttattttcctctgaagtttaagttgtctagcttcagtttgcagggctttaagaaagcatggcttaattttagtgatttcaaaaatggggaaaaaatggaaaagaagaagaagaaaaaaatttgaaaacattattatggagacttgtagccagtacaaattttagaattcagtccaaactgtagaaaataataaaaattgaaaaacattaggcaagaccaaaatctaacaacaggtgttctatagtttattttaaaacataagttttctctttccagtcccattttcactaaagaaaaatcataggacaatttcatttgcaaattaagttttagtcttattatacttggcctgagtatttgcataaagtcagcaaaaatagttatttgccatataggctcctctttttttttaattgactttgctggagctttattccataaagaatctcagatttgactttaaggccttaaggacagcccatgcctgcaaatacctgtattaattgggtgaaggcctcaccttgaggtctcaagaaaacttggggctcctggacctgtcagaaagtgacattctttacttaccacaggtcaggaacctgtacagagattgtgtagacaaggtatgaggccagctttcccaagggcttttattggctctataaatcaactttggttccttaaaggagtctgtatctgatagcatgccattccagtcaaaaccatggtaaaataaccagtgtctccagctgtgctctgttacaaaagaaaacagattgttatcacacttacacaaataactatattgtaagttaagaatactcacaactaattaccaaatttttggagagatcaggtagaaatatgctccaaattttgtttatatgagtatattttactcatttttttttgaggctgagtttctctcttgtctcccaggctggaatgcagtggcatgatcttggctcactgcaacctctgcctcctggattcaagtgattctcatggctcagcctcccaagtagctgggattacaggcatgtgccaccacccctggctaatttttgtatttttagtagagatggggtttcaccatgttggtcaggctggtctcaaactcctgacctcagatgatccacctgcctcagcctcccaaagtgctgggattacaggcatgagccactgcgcctggctactcaattgttaaaagctgtaaatagctcaaaagaaaagttttcttggctccgataaacaaacaaaaaaaggatcagcaatgttttaagcaaaaagttataaaaggattttcagtcttctaaaagtccacagttaactcctgttctgcatgttattcatgaacatttcagctcttcatgggagccttggaagttttttctctattctaacattacaatcttcaaaacttgcattgaagagcacctatcagagtcctatgccgattataaaaccaccttttgaaagggataaaagcaaaacaactgtggatgacaaaagtgttgaaacagtcatagttaaagacacaattgacaaggaaacttggttacttctgtggcatacagcaattttacataataattactactgataaaatatgctaaaacatatcagaatcacaggaatttcatacaactctgagcacatactaataacacatttatgtaaatataatccaaagaaggttaaacactgtttcatatttgaaaatacttcctgtatgattttattatatcgaataagccaaatatgtctcttttggacttcaggggaataatagctcagaagaaaagctttcttggttctgaaaatcaaaaaattaatgggacctaagttagaatttgactttggaaattttgtcaaatataaaaagtataaaacacttgatatcacaaaataggatcacaggtcattgtaaaataagtcattcatttagccaaagtgatacctcaaagagttaaaaaaaaaggcaaaaatatttattctttgattgaagagattgatttctcaaacaattagccctaataaaaacaacaggaggccaattaaatttgtttttcaaaaatttttaaacaatctataaaattttaatcatcttgaccataagatataatttccataagcctttttataacctttataacctttattaaggagtgggttaatgctccaagaaaaccttgttaatctgacacaggggccaatatgctggtcttgcatcagcatgcctttgacattaatggttaatttatagagaaactaaacttattttatctctcaaaatctgcccttataatctcatgtgcccacctcttctgcagtagtctttggaccttgaggagttgaatagctttaatttttggcgctatgtctcacgaacgcagtttattttggttgacatcttctacaggatctgtaggtgaggctttaactgctgtcagtgtttaagatttagcaggacttggtgtccttcttagacccaggaatcaaagccctgtaacttaatggcacaagtactttaaaagcacatacagaaatgtagagcacctgattctgtcactgttctgggcaccactatgtaacctgccatgatccctggtggactgaacaaatgggggcaaatgtgggaataaaagacaagagacaaaagagtatatttggaagaaggggtcaggggaaacttgcctcttgtggacaagggccctgagctttacacagccctccatatttattaggcaaaagagacagtgagaaggggagtggaagaaggggtcagctgcttagtccagagtaggcttgcaagactgcattcctcaaacaacaggctctagatgttgcagtagataacctcggcacccgggagtgattgcctccagcaaaccttctgtcggcgggaacacttgtgagtttgctcacatcctgcattcatgataaacagtttgctgttcgatcatatagcctccagtggaatgctgagttggtcacgtcccatgggccttcggctcccttcacagaaagttatatggacgtaataaccttaattaaaaaaaatattctttttgttaatctgcatcttttctaagcaaacgaaaacttagtaataatgacataggaattatttagataaagtgtaagatctgtttattaggccagttacccaaaggcaaaagaaaagaccttctgcagtgcgactgctgttctctatggggaatattatattggaagaaaatactccttttagatctttaagataaaacatttttttagcatcaggccacaacatttataaccagaggaaaaaaaatcttacaggagctgaaaatgagttgaagattagttattatttcaggccttttaaaaggcgagagaaaacagaaaagagcaagatgcaataaaagtcgaactttgtgtaaaaaaattataatgccttgtaatttattaagagtaaagcaataccttaagaaaattttgtagttcaaaccaattctttagtgtataagtggttttttaaaaatcaaaacccaatctctggaaagaccattttaaataatttccctttaattgtagacaacttgctcatatgaaagctttttttttcatctgtcttcttcttatgatgtaaacagaccatttctgacatgcttggactttctagttttcctgagcatccctctttctgaaaaaaaaaaaaaaaaaagtcattttattctaggacaaaatttaccataaaagattctttcttgtataaaattatttttctttaagctttcttaccaaaattacctctttatttctataactttctttacatctctctcatttcctgattcccttcactttgttttatacataacctttaaataagctttgaatgagacaaaaattattcaccttttaaaaaacacacttttttttagaaagaatgttttcttacaatatattttttaattggaatatacccaactaatgaaatatctattatttaatttaactttagattctaaattatgacacatttgtctataagtatttatcccattacatttacctaattatttttaatactgtacctagattactgtatttatgaaaactgcaatagtcattatttaaagttatttccctgccaaccattttatagcctgtgaatttcaggtgtttatctaagtagaaccttaagattaaatatatggttattttactaaatcaagatttagctattttcattaaactaatgttcttgtcttatttatcagacagtacacaagcaaaggttatcctgttttgggctgagtttatagttttgtaacccttgtgccaaattttgacaccttatagtatttggcagggataagtatgaaattgcttgatcaataaatgcaaacaaaaatgtatgctggcaattcttaagacatttctaatattgctttaccagtaattttaaaactagcttattaaagacttaagtcgtgtgaacttgaaaagcatttgggtttatcatttaatttatgagtactctttaagccattgtcataccttgtagcgaaaaacacaacaaaatgtgtatgtacacataaacacacacatacatactcatacaaccaaaaatcctatagcttttacttcagaactctagccatgaaatattaatacaaacacattgtcctgcagaaacaataacaaaaataaatgtctggatgcaaacagtggattttatctcaggagaaatgtaacagcagacttaaagcaggcagaggcagagaagaaagcagagagatagagaacttaggaactttatagttgcagatcgacttttgggctctgaatttttcttgctgtaattgtgcatgaaaataccatatatgttcattttacaaaaatacttgcaagaagaggcaccataaaaccaacagagtgcctgaaagagggtcattctccttgtttttccttattcttagattatttgtttcccacccttttttttttttttttttttttttttgagacggagtctccctctattgcccaggctggagtgcaatggtacaatctcggctcactgcaacctccacctcctgggttcaagtgattctcctgcctcagcgtcttgagtagctgggactacaggtgcgtgccaccatgcccagctagtttttttgtatttttagtagagacaggttttcaccatgttggccaggctggtctcgaactcctgacttcatgatccctcccaaagtgctgagactacaggcatgaaccaccgtgcccggccttttttatttatttattttttattttaagggacgaactgagctgtggcctagcattttagtggagtgtgtcaaagtgtgctggttgcgggtgagactctacagtgtgtcaccactgagccatttccaccctcttacgtgtctcagtttctctctgtgtagttctagcacctccaagaggctcaaaatcaaaatgcagggtgaccagctcctatatgcacttcctgaatgaggctttttaaactaattttgttgggggttccctgtagggttgctgcatgtcatgggggggtcaaccccccaagacactcccacttgccctccagtcacccaggggcacctttcagctgggaggtgcaaaatgccctttctctttgaagctgaggaaactcattctcccatttatctgtgaaaacaatagttcaattcctcatgcaaaatgctcacactagccaattgagattaatttcaggaggaaaggcaatggagaagacaccctttagaatgtacctctgaactagaattagggtcctaaacaataacttcctaggagaaaaaaaaaaaaaaacagctaagaccacttcctgtaaattgtcctcagccacctctaactttgtactctcatccaccattatacacactaaggtcaaatcctctcccggtataaggtaatctctggtacccccaaaagccaaagaggtcaggtcttacaatacaggagagcagagcttcagacctaagaagaatctgctcatgactcttgaaactccacaaagaaaatggaacaccccaaaaaggggcgggtggtgcctttgttctgaatactttaaggggtttgagtcattggaagcctcctctaggtttttattggtactaaagatagtgaagggggaaggaggtatagggcggaagaaaagtaaacgaaagaaaaaaagtttttaagacaggaagcaaggatagcaaacgtgcatgttgtgtttttttttcccctctcttgcagctgtgagaaattttagccaattcagagaggtcttgttacccataatttagaattctcattcagatttgaccaagtcaggtagagctggtcaaatctgatgggagaaagatcagaacaacaaccaaaaaaaccctaacaacatgattactgagcactttaatagtaaggagaaattaggaacagctggttgttaatcttaacttcagctaagacaaaaccccaattcagctacttactagagataggtcttaggcagaagattgctctctaccatcctagaagcaggaaagaatttaaacttgccttccctgttagaaatgagctcaaactccagaaaggagttaggtgccttccatcatcctagaagcaggaaaacttgcattccttgttggaagcaagtaagactgcaaaaaaagaattgtacagcaaaataaactttagaacttgaccaaattttgggagatcagggattctctggaggggaggctcctaggcctcagcaaattgtcctattggtttgaaccataaagaaagctcaagctggtatcaagcaccgatatgagatttgtcaaaggtcagtggcacctccactcagaatcccttcttggttgccaaaatgtgaaccccaaatatctgagacaggtctcaggaaagttaggtagtttattttgcaaaggtcaaagacatgcccgtgacacagcctcaggagatcctgacaacatgtgcccaaggtggttggagcacagcttggttttatgcattttagggagacatgagacatcaatcagtatatataaggtgtacatttgtgctgtccagaaatgcaggacaactcaaagtggggagggggcttccatgtcataggtagataaaagacaaatgattgcattcttttgagtttctgattagcctttccaaaggaagcaatcagatatgcatttatctccgtgagcagaggggtgactttgagttccatctgtcctttgtctgcaaggaatttccttatggacaaattattagggaagtatgtagcttttttttatcttagtagctatctttttaagggctagaatgggagacagatttgccctaagtagttcccagcttgatttttttttccctttggcttattgatttggggatcctgagatttattttcctttcacaaagctaaggccagagaagtgcttagcagagatgtgctagaagggactctggggtgggtgggaggatgccctgaaaggtacgttctaatgctggagctccaggcgaaggtgtggtcctggaggagcaaaggaaagggaatcatggagcctccagttatctgaggctttagcgctttccaccccccagcctcacacccactgaaccaggggcatgggcgaaggggcacagctcctcatgccaatttcatttcagggtccaagcagtgaagacagtttaacaacagctgcagctgcaaccgaagtgtccctcagtacttttgaggatgaggaagccagtggggtccccacagatggcctggctcccctcacagccaccatggcccctgagcgggcagtcacttctgtaagtgtcatcttgtgtcctctctggctcacaggggagagacaggtctgcatcatgcgacaacagtcatccttggccttggcaggggcacctgtagcttggttatgagcacatgtctgggtgggcagctgctggagggaggcaggacacaatgctggagtgtagcagaggccacagccctgctccctcctagccttgcccaagaatttactcagagacaagtggtccacagttggcactgaggcttagaagagatgcatatttcagaaggggtgtgctgggggtaacgatgatcgtaggtaagaacgtgctttgaaactgggctggcaccacagaaacgactgttacaactccctggcagcctcatgagcgaggtgaggtggtgccttaatgctggttttgttttcagggtcctggtgatgaagaagacttggcagcagccacaacagaggagcccctcatcacagctgggggtgaagagtccggcagccctccccctgatgggccaccgctgcccctgcccacagtggctcctgaaagatggatcactccagtaagtggcatagagctgtaagatttgacttggcagaccttacaggggagagaaagaaaggccagagttgtgggaagggctggcccccagctttctcagaggtaggttttcatgttggtttgcaaatttgggcatttgaggagctttaacctgaggaaagcttgaggaaactccagatcatagagaaaaagcaagagattaaagtcaaggggacctagctttgtgtcccaaactgatctttggattgaaatgagatctaacagtcagtgttcttctggggacaaagttgacagtaagacgtggcgggtctgtagaggggatgagagcatcagtgctgtgtgtgtgttgggggtgacctccaagtccctgccaacatgagtttttatgactcttggctacaactgtgtgaccttaagcaaatccgttgatttctttggccctccgtttcctcatctgtgaaaatgagtggctgcaaggccaagtcagagaatgaatgcaggttggagaacgtttacaaagctctgtacccacacctagggttgtcaccacttaaggactataactgtgtctcttagaaataggaaacccagacctggccctcagcttgggcttgtgtgaagagggactgctcttccaatgtgaacacatttttaaaggaaaatatctccttggtgatcagcattggctcatcagttccccaaacaccacttggtcatgcacactttgaaagccaccactcaagctacagtcatgtggcccattggccacggtgcggcaggactgacctgtgaggggaggggctgtgggacgggagatcaggacagccccctgaggtcctgaatgccccttgctccggggcctcctatagcggttatcacgctgcttcctgtctctttagagttgtcttgcattcattcgttgattcactcattgactggacacatagcggctctgggccctcagtcaggacacttgtagatagagatgaatgtgacctcactcctgtccgcaacaaattcacaatcaagcggcaggaagtaagccatctgaactgacattgattaatcactctgtgctccaagtttacctgattctcttcaccacattcctcttcagtataaggtgaatgggagataagatgtggagaggtaaagtcacctgccactgttgcctgcctctgagaggtagagctgggatttgaacctgcatgctggcctgcaaagctggagctcttgagcttcacccagctgaagtcctcatccatgagagtgtggtgtggtgggaagatcctggactgggggccaggagttcgaggttctgcttccagagatgctgctgacttgttgtaggccctgggcctccttgtcatcatctataaaaggaaaaaaggtgaagaacaactctggtttttaactctggtcacgcattagagatggctgggaagcttaaaacaatgcaggtgtctgagtccagtgctagaccaagtaactgagacactggggctggggctttgggcttgcagggcatctagtgggcagccagctctggattgacccgctcatgcactgtgacttcccaaacaatgtccccctgctcttctgcacctcaccccaaggtatacacaaagcaccaagttcaaatctccctagtgatgccacatcgggcacagatagagccggttctcctgtttctttctctttttaacgttttattattgaaaacctaaaaatgtcacaaaggagcttagacaaaggagcttagaatagtataattaacccccacatacccatcgttcagtttggataattatcaacactgacaatcttgcttcatctgttccacctcctaccaccatcttttttggagagaaggggaatactggagtattcaaaaatcaaccccaaacatcctatcatttatttaactggtaaataattcaatgtgtatggctgatagagtgatctggtacctttgttttggtcatagccatagtatcacgatgcatctaacaaaatgagcaggggttccttcgtattatctaatgccctggctattttgttttaaaatacctctttccagtttgtttgactctgaatccaaacaaggtctacacattgcatttggttgatacgtctcttaagtgtctcttaatctctaattgtctcccgccttctttttcccttttgccattaatctgttgaagaaactgggtcagtttcttccttagacccttgatgttttcagctttgagaagtcagtctggtaaggctggctgtgctcatgggagtgtgagggttactgctcctgggaagctctttgtccacatatattaacaatcataagagcgcatattgctgaccagaaacttctcttctaggaattgattctagtggagatagtctgatagcctttgttgttgccgctttttaaaaaaaggctttgtttacaaggatgctaatctcagtgttgtccataatagagaaaaattgggcataatttaattagccaacaatagaagattaattgaattaaagtatattcaaacaatggaacattatgtagctaataaaattatacctgttagaaatatttaatgatgggggaaatgcttagcatataatgttaagtgaaagaagctggttgtaaacctagtatattgtgtggttaactatttaaaaatacacacatgcaaaaacactagaaggaaataccctctgtaaatgttggcagctgttgcctcaaagtggtggaactgtggaaggttgttaggtttttaatacattgtggtttaatacattttctactatggtggcttacaatttttatgatagattttttaaagctctgagaaggaagagagagagagagagacagacacagagagagttagagatagaataagagagagaaacggagacatggttgatgtctgatgaagacattcctgctaagtccccacgttagggatctgcaatgaactcagatgaatgccccgattcctgagcagagtctaaaagcacaagattgtcaagaaggcacccaccttgggatatctctaggatcagtttttttgtttctgtttttgttttcttgagacagggcctcactctcttgcccagactagagtgcagtggcgtgatctcggcttactgcaacctccgcctcttaggctcaagcgattctcctgcctcagcctgcagagtagctgggattacagacagacatgtgccgctactacccggctaatttttttgtttgcttatttgtttgtttttagtggagacaggatttcaccatgttggccatgctggtcttgaactcctgacctcagatgattcacctgcctcagcctcccaaagtgctgggattacaggcgtgagccgctgcacccgtcctctaggatcagtattggcccagcctctaggatcagtattggcagatatgtgacagagccaggcatgctatactgccatggtgactctaggtcagtttgaatctcagagtcaccatgacagtatagcttgcctggctctgctacatatctgtggccagttttcttcacttctctctgtcacagttgactcatgcatcaaatgggaatcataatcttagaacctacctcttgatttgtgaggattaaatgagttcatccatggaaaacatgacccagcacatagtacatgctcaataaattagctgtctagaattattttgcagatgaggcccagaaaggattagagctttgctcctaggggtccagtaggagtgagagcctttgtctctggattttttagtgctttggttttctgcactgtttacaaccactgtcttcagacgggagccagaagttgattagcaaagcccacactggtcacaatgatgtcattacatttctaaggactgactaatagatcttaacaaatatatggagaatgttgccctggaaatgaagtaatatatttaaaaatctgtgttgtggaacacaagtgagagagaagactgattgtcaggtgtgggtgactccaaatgccaggctcttcccactagtcatttggcaaataggtactgagagcttattatctgccggtgcaggggatggtgcagtgatcaggcagcctctctcttcatggggctcactgacttcagcccagtacaagccctagctcatgcccagctcactgaccaggaccagggaatgtcatcggaactcagcagccccatgtcccaaatatgttgtggccacgttttaaccaaatcttcttcttttaggctcaaagagaacatgtgggaatgaaaggacaggctgggcccaaaggagaaaaggtttgtgctgtgaccatcctggggaacactttggctcctgatcaagtgtcctgaacatgttatttaggtttgatttagcccactctgatcaaggggatcgcagaagcagcaagagggctaagcccaaaagaaatggacttgtaggtctgggagaatcaggaaaagggcactgggcagttctgactgagtctcttctcaccacctggtgaccgtggccaagtcccttgacctccgtgggccttggcttctctgtcgagtatcaaagggtcctatgattccacacctggctctgccacacatctgcaaccagttttcttcacttctgtgtccgggctctgggctctgcccctgattttcttcctgggaaaatgttgggcagacaagagcttttgaggaccacaggcctaggtttgcctttttgtagctgtgggatctcccgaaagttctttactatttctttgctccagtttctccatctgtaaaatggaggtggtgatgatgaccctgcggtgtgggatgacgtgaggggatgtttatagaagtgctttagctggtgtcagtcactgcgggaataacaaattcctcttaccaaaacacctattggtgataagctgttcccagggggatgtgtccacagtgaccccagtcaagagatcctgcccagggagcctgctctggccataggcagcagcttggctgcctctgggagccttctcatctccaccatgaccctggtcctctgcctgtctcacctccctctgggctgcacagaggccgttccttgcagcagatgatgctcccgtcctggggcctcctgagtgcccaccggggtgtggggaagggagggccagggctggggagggcggtgtcctcacttctctctgcctctggctacctcagtggacttcagatggagcagggctctggggtgtagcaggaggcacacagatttggggactttactgtggacatttcctctctccttttggtggatctggccatcctgtcaccttatttgtcagagaagccacttctctgggccctttttgacagccaaaacctcctgggatgccactctgtcattttctttcatctgcctcttttccaaatgtgtgcttctgtcattcgaaaagcattttctggggcactagccttgtgccaggtgctgggacctggaggtgattcaggcactgtgcctgcccttgaggggcacatggtcccagaggggcagactgtgagcaatgatgttcctgtaaaggtcacacgccctggtgagaggagcaggtgggcagggcaggcttcaggggagtccacactgggcctgagcactgagcactggtgctctagcagggcccagatcagagggtggggataaatcctggaagaagggagggtgtgtgtgatgcgtgctcatactggtcagctctttccaccacagcctgtgccctccaagtatggcacagaaacaaagggcttctgagccctggggtgggacaaggcattcccttaagctgtctctgcaaaggacaatgccatttttctttcctgtgtgatcctgattttaaagatgagcacgatttctacagaaaggtggggagatggtaggaacagagttccagccgttcactgaccattttgttctctttagggtgatgctggggaggagcttcctggccctcctgaaccttctgggcctgttggacccacggtgagattcccatccaggcttgtcacacacacaggtgtaagaccagggatgcggccaaaacagccacaggctgaggactctcctttttggcccccaaagtatcttgcagtcagaccctagggctttctgcctctactaggactctgcagtgtgcagcagcagaactgatttctatccagtttaaatcctgcaccttgagcatcccagaagttcttcaaactcaacacttcccaagctggactcattacccatgccccagacctgcttctcctcctgggttccccatctctgaggatggcaccccatctatgtggtcaccaagagagaaacatccttgagtggtcctctgccttccccagccctgcccagtgtgtccccatgtccccctgagtctagctgtgcagtgcctcctcctcctctcttgggcgatggcaccagcctcctaactggtctctccgcctccatgtcaccacttcccttcccccacacacatgttcccaccactgtgaccttcctaaacacagctgtaacccccaaacccagctcttctgggtgcctctcagggggtgctcagtacacacacattcaatgaatgaattaggccctgcctggttcctgtcttcaggagttaagtgctggaaaggtgttttgaagattccccttgttcttcagatacatttgatgccattcaagtatgcactgagggctctctgggtgctcggcctcctgctggactctgggcacccagtgtgtctcaggtttgggctggctcttgagccctagtttagaggagccgatggacccacgcacaactaagcttcgagtcaggtggtcctagcatctcactgagaccttgacagaggctagtgggagcactgtggagggagagaattctgcctggaaacggggtagggagggcttcgtgtaggaggagactgcggaactgggccttgaaggatgagttgggaattgaaaggcaggaaaggaggccgaggacatgagtgggctgcacagctgggaggcggcaagagagaagggtagctgtagaggggagtgggagaaaagtcagagagaaaacggggagcagaagttatcgggctataggatataggaaacatttccccattttggagaaaactcagtgacgtggctgtccttggagtctggcagttaaatgcaagtagtggaaatttcttctctttccaggcaggagcagaagcagagggctctggcctaggctggggctcggacgtcggctctggctctggtgacctggtgggcagtgagcagctgctgagagtgagtgtgaaggaggacacgacctggtgtctgggactgccttcaaaataaccccagagggagggacgtgggggccagggacagatgaaactggattggctgctgctggggttgccggcagtgagctcatgggggttcattctacttttccttgtgcttgtatatatgtttgaaattgttcactttgatcagttgcattgtaagtgagtacgagcctacatttatcttcaggacctcctcaccccaccttcttcctttccctggtgggcttcttgagcaggctgccctgcagcaggtgtgcccagtgcccttcacctctgccaactggctttcaatcctccctccccctcctctcaccctattcattaaagagacctgctggttttgtctctgggtggctattctacttcagcttccagaaccttcctgaaatctccttcccttatgcattccctccctgcctccctctccaggctactctttctctttggtgcctcttgctcccctggcctcctgccaaggctggagctccaccagtcctttctgaaattgccccctggggagcttctaccttctctagctgcagctggtgcctctgtccctgagagcctgtgctgaatccctggttgaaagctccacttggctgcccctctgcccactcctcatggccagggctagaagggttctggactccgtggttaaatggaatgggagccaaatgaatctcccagcctggtgggatcagccaacccagcaatgggctaaaaacactagtgcacttcagaaagagttttaaaaacaaggctacaccacaagcagttttttttgtttttttttttttttttttttgagatggagtcttgctctgtcgcccaggctggagtgcagtggcgcggtctcggctcactgcaagctccacctcccaggtttacttactccattctccggcctcagcctcccgagtagctgggactacaggtgccggccaccacgcccggctaattttttgtatttttagtagagacagggtttcaccatgttagctggggtggtcttgatctcctgaccttgtgatctgtcctgactgacctcacagttaatcagaaaactaagttcaccagagcacctctcagaattccaactaattggatctttcttgtattcagccttttgggagaaaacacgatatgatgggctcagaaagactgagattcaaatcccagttctgctactaattagctgtgtgtctgagagcccttgagtcgcatggtctcactgagccttattttccgcatctgctaagtgggatcaccaaaccctacatgtaggattgttgaaagaatttgagagattgcatgaagcacatactcagtatctcattcggtattcccccactgtttctaacagagtctttgtgtttttagggtcctccaggacccccagggccacctggcttacctgggattccaggaaaaccaggaactgatgttttcatgggaccccctggatctcctggagaggatggacctgctggtgaacctgggcccccggtgagcaactgaagtcttctccccatctctgtggctgtggggcttcctttagcaggggaggggtgtacagattgcaaaacccagcactgtccaaggttcgcgatggggagagagcagctagctgtttgtaaacagaaatcctcctcatctgaatcattgctgagattcgaaagaagcagcagccaagaaaaacatcatcctacgtattgttttgctgctttatcatagtcaatacagatggccccctacttacgaatggttcagcttaagatgtttttgactttacagtggtgcaaagtgatgcacattcagcagagactttaccttgagtacccatacagccattctgttttcactttcaacactttattataaaataggctttgtgtttgatgactttgcccaactataggctaatggaagtgttctgagtatgtttaagttaggctaggctaagctatgatgttcagtagattaggtgtattaaatgcattttggacttaagatattttcaacttgcaattggtttatcagatgtagccccattgtaagtcaagaagcgtctgtacaggagacacagattcataaagaatcttggaatcataggccatcagggctgggcctggggtaggagacccttggagaccatctggtccaaccctgtctctaacttccccatagaggaggaaatgtaatccagagagtgaaggacagttagccacaggtgcacagtcagcagtgacccagcctgggccaaggactaggttcctgccttgcacctgacatgaggccctgggcccaccagcctcacctgcctcccaaccctgccctccttttctagcaagcgtgtgtatgtgatatttagcagaaatgttgtgggttgattgtcactgatgttccccagggccctgagggacagcctggagttgatggagccaccggccttcccgggatgaaaggggagaaggtacggggaacacgggagggtcccaccacatgggagccaccaggcccacactactctctctgacccctaaacctgaccttgcctcttatgtgactgaccccctggcctcctgaaatcccctgctggccacttctgctggatgtctccatcatgggactcatcatgcccaagcctgaactcagcaccttccctgcccactcttgtctgcccctagcttcagtgaatggtgttgccatctacctggtcacctggagcgagaaatggaatcttctctaactcctccttccctccctttcctggtatgattggtcagtgccaagatggcccagtctgacctccacatctctcacttttgtctccccactgagctggactcatctcttctcattcgcacggtggccttgggctcccagttgctgtcccattctctccacccaccctccagcctcctgcccagttcaccttcctgtagcaggctctcgtcagcccctgccctggctactgagaaaagatcaagggctcaactgcctgcaggacacaccctagctctgtgcagacatctggcccttcctgattcgcacaagctgcctctgtagtgcatcccccaactcctcacacggcctcttggccagtgggctggttctgcccaaatgctctgggcacgctcttcccttctgtcctcctggcctttgcacatggttttctccctgtttgggatgtccttttccttttgtcatcctccaagacccagttcagatacatcctctggggagctctccctgactcattatgagcagaaagcacccctccttcctcccctttctatgagcatcataggaagttcccatgctattgagaacctcccttgccagtgacactaaaggtgttagcttacctgtctgctcctcacccccaccctgacatagagcatagtactgcctctctctccttagaacctagcacaagcctctattagtgtttgatgcatgaatgaaacttttttcagacaccattagtctacttttcccagagtctggcctgccttcatcctcttcattctctgtctgtaagctggtcctgcctcctgtctgcaagcctgtgctggtgctacctggggcgtgtatgtgtagggggtgctttctgcctctgcagtgttcccagcttgatgagataagccatgtctgtcaaaggaaggcaataaagacaaggtgagccctgtgctagggatgcgatcagtgggttttactggggtctagaggaggaagagagatctcagctgggatcagaagtggggccttctgtgaacctctcatggacaaagacgtggaaaatgctgactctgtagacaccaccatcatcactgaactgaatttctagtttccgtcagctctggagtatgtttattttaattggaaccataactcaattttcgtggaaagcttatttctcagaaaaagatacaattgtcaagctttatagaactcattttacatgtaccaacagttttacagaaattaaattttgcaggaagcaccacagacctacactcttcttacctgttcttcttccaggcttccccccacccacccacacacacccctcccatactctgtctcgaacttaaagatacccacacccacaactgcatacaaaacacccttgcacaggcactctgcagctgcttgaagaatcagcagtgcaaggagcagcaggcttgcctagggtgaatgttggagatcaatcacatttgtttctgaaatttgctatgcatctcaatttgttgcactgtgcacatatgaggttttctgatcaagcaaaaacagacttggaagaacttggaaatttgcatctggagagctggcaggaaactttgcacatgatatttaccttaaaaacaaaacaaaaccaaaaaagtccctaataaaccaaggtgcatattcagtatgtaaaataacaaaaaatgtgctaaaggaaatgaacagcttcagggctgtagtagatcataagatccaatgattcgtttgatctttgactccccatcaacaatatctgcccttcaacttgcatacctccagtgacaaggaactcatctcctgcccaggcagtgccttgcaccgttggatagatccacttatagggaagtctttccatttgctgtggtgaaatcagcctcctttctctttagcacagcacatagaccaatctaggcagttatctaaaatggagttttctctacaaagaataaggttcaggttatttagctggaaaaaaatgttttttatataataattattattataaaatatgagattgagatcaaaacatgatgctcattaagaattcatcaaatatcttaagtatgagctaagctatgaggacccaaaggcataagaatgatataacaggctgggtgcggtggctcacacctctaatcccagcactttgggaggctgagatgggcggatcatgaggtcaggagttcaagaccagcctgaccaacatggtggaacttcgtctctactaaaaatacaaaaattagccgggcgcagtggcacaaacctgtaatcccagctgctcgggaggctgaggtgggagaatcgcttgacccgggagccagaggttgcagtgaaccgagatcgcgccactgcacttcagcctgggtgacagggtgagactccgtctccagaaaaaattgaaaaaagattgatacaacagacttgggggaaagggtgggagggagtgagggataaaagagtacagattgggtacagtatacactgctcaggtgatgggtgcaccaaaatctcagaaatcaccactgaagaacttactcacgtaaccaaataccatctgttccccaaaaaacgtattgaaattatacaaattaaaatattttttaaatgatacctcaaaaagaatttatcaaatagattattctatgctgagttcgatgatagaaatattccttactttatttttcccaaatcaagatgatcaactaactcttaagatctttagcccaagaaggaatgggtgaggagtagcctgctttctcagcagtagaatgtttctagaaagaatgcagaagaacttgctgaagaagatggatctctgaaaaatcattcctttctgcttttgcactgcagattctgccattcagttctcggaacacacctagtattaacagttgttgttgattttctactttcagaatctaagtcattcatgttattctgcagtctcaaaaggtactgggacacctgggcaggaaagagtttgtgcttggaaattttcttcagtgtccagaattactgtggaatgctgaattgccagtaattgcctttgagtaatttcactgagctgccaaactgtcattgtaaaatcagcttctgtcttttccgttgatgtaagagaaatacaattagatcatcatcaccttccctttctccaagcaatcccaattggtctttgaacaattctctaaaccttgtataagaaagaaaagagaagtaagctgcttttgcctaggatgcagtaatgggtttagaccttctaacaacatgtttaaatgaaacactgaaatagttgcctaatttcctattttatatcttctttcattatcagaagtgtttggttcaacatctggattataggcctccataaaaccaaatagatggctgggtacagtggctcactcctgtaatcccagcactttggtaagcctaggtgggtggatcacctgaggtcaggagtttgagaccagcctggtcaacatggcgaaaccccatctctactaaaaatacaaaaaattagctgggcatggtggtgggcacctgtaatcccagctactcgggaggctgaggcaggagaatcacctgaacccgggaggccggggttgcagtgagccgagatcgtgccattgcactccagcctgggcaacaagagcaaaactccatctcaaaaaaaaaaaaaaaatcatatagaccatagtcaattgtaacagaaaagaaactggttatcagtattacaaacagcagaaggaaaaccaacagacatccacaaggcagtaagatgtgctgtctcagaagccacacaagcaaaaagaatcctcatctccattaggttctttgaggttcctgtgtgctgaaattgagtaatgtccttagaaaatccaattcaccacagtaagccaacattttgaatcaattctaaaccacgatgttgtaacagacggcactattttacctcattcctttgcaatgtttccattagtgaactgataccttcatatttcatcacttttaaaaccatacttgcagctctgctatttggaattccaagattgcatgcatgccctcactgcacaaaaattctctcactaagaaataatgtacaactccaacatcaccattttgggaataggagccttccctcagcctgttcattggagctcctccttttcaccctgcctgttcacataagttccagtaaagtggactcttctacccacaagttaatctactcgtgttccaagctgatggccatcttatctgtgagtcaatggaatggattcagatactctctttttaccatgtctaagctggataaaatcatctaagaccataaaccaaggcccatgatatcttctagaacttcctttgaaactctataagatgccctcttgattggaaaggaatgaggaaggcaactgaaacaattcagtttttcactttatggacataattttctgtaacaagatcagccggccatgcagctacaaggtttttagagggaggctactttagtttctgtttcacaacaatcctgatggtagtttgacttgttactgaaaagatgcacaagattggcactttcattaaagacagtttgcaatgggcagccagcaacaagccaatcatacccaagaggagcagacatagcaactgtagcctctgggttaggctataaaattggcatccagttattggagtcatgtttccactgcaggtggaaggtcacacttagtttctccctggtgaggctggccagcagggaggtgacagagcctagtcgctgtcacttctttcaccgagcacaccttctcctcccatctccccagaatggctggagtgtccctgctggctcctttgccacagaggcaccaactttccatgaagctgcccctggagaccttatggagggctttgctcgcagaaattccttgccactccagcctcagagcctgcctccagagcctggtgcctcacctgggagcccagaccaccctcagcccctgtgatccccattcctaggccaagaactgggtagtgtgtcccaataggaaaacactgcaagagatgggacccttcccatgccccacgcatgcccccaggtgagaggcatttgtcttcctccagcatcaggtggaaaccctcacctagcaaacccatgaacctcacccatgggagcagccagttccgtgaggaaggttatcacaactaccaagcaaacagcatgggctcgagtctgtgaaggagaaagggggagattgttgcgtgggggttgcctattgtgtgcaggcagttttgcggacacgtcatggcctcatctttctcatctatcctgagagctttgcttaggctcatactcaactagagtcccaaagtttcagagctggaaggaacctgcaaattgctttagtccctggttttctgtgccctggcagagccatgggactttgtggaagtgccttcgggctggtaggtgaggacagaacaactctacttcaagcatttattaaaattaaaattaaattgtaattataaaagtaatatatgaatatagttttcattgcctcatgtgtcctatttcctctttaattatttttgttagagtaggtcctccagtcatattttcacagactgtctgtagatggcaaactttctgagaccctggattttttaaaatgtttttattttcttatttggttgagtatagaattctgggttgaaagtcatttgcccttgatgatttgaagatgatcaccatcatcttccaacatccggtgttgtcagcacaaagtcagattcactctggttctcactctattggaggtcatctgatttttctctttggcaaatttggggatttattgttctttattcttggtgtttaaaaattcctctgcattgttactaaatgtggattattgtttctattttatttttattttttaatttatttttatttatttattattattttttgagatggagtcacgcagtggtgcgatcttggctcactgcaacctcctcctgggttcaaacgattctcctgcctcagcctcctgagtagctgggattacagatgcacaccaccacacccagctaacttatgtatttttagtagagacggggtttcaccatgttggccaggctggtctcaaactcctgaccttgtgatctgcccacctcagcctcccaaagtgctgggattacaggcctgagccaccaagcatggccaatgtgaattattttttaaatgtattctttcatttatccttcttggtactctatggactttttttggggggaggggtgccttttaatctggagacttctgtgttttttcagaaaatttaaacactgcattccttctttctctttattctctcctctgccactccaattaaaccgatgttggaacttctgattgtggcttctatctctcttactactttgtcattctgtctaggtctttttaccctcttgtgttgctttctgggagaattctgtagcttgatctctgtattaattctctctttaggtgtgtctattctgttatgcagtccttctgcagagttctgcatttcgacagttttctatttataatttccaagatctctaattggttctttatcataaccactgtttttatttcataatagcttgtctttgtgtcatggctatgttatcctaccttttctctgtgagaatgtgtgtcttatactcaatgtcctgattgaattgttttcttaactccatttccttggatgtaaattctgtagttgacttagttgtttctcacagtattgccttgcctcagatgtttgtgtttctttcttgtgtgtttacttgtgaaattgggatcctgcctgagtctgttttctgcctctgttggtgcagactgttgggaggtgggcagtagccccttctgagacatgcagggttcaggaaggggatggaaggaataagatgtgccatcaggcagggcacctcagcagctgatcttccgcgtgtagggtgcccttggacctcacagagtttcctagtcatctggggctctgccctatgtctttagcccaataaacaactgttgttttctaaaattaaggtatccatattttctccttggcaggagtgagggtgggaggggaggggagatgggcagggctggacagctagcctgctgcagaatttcaacctatctaccttctggggcccaggggccacatcatgcacctgacttccatcacagcttcacagcagacttttctccctgtggtttctcttgatggctgaggcccctgtcttcaacttccctgttttccccttggcatttctattttggatttaatgccactccccatcttatttttgagcacggctattttagaactatccattctctcatttccatggatttgatataaggaggagactgtagcccaggaacaaaaatgactggggggaaggacatagtctttgatggctggtacatcagcatctctctcaggacctcctgtgtggcatgcaattgctgacttcatctcttgcaggtgcatttgtggtttcctcagagattctccatctgggggccccctaccacagtcctctgatgtaggccactgtcctcattgctgaccactcctgaccgcccacctgctttggtcctctcctctgcttggagctcacagccgactcctttctgtgacatctgcatctaaccccccaggaaactgtagtgtggtccccactgggtgtggacatgcaacctgccctaatgcaacctcctccccaattctgtcttctggggactactccagccagctttgggtctttagatctttccacaagagagccagtcatcatcccccatatatccaaaagtctaggggatacatttcagatcatgaagccccttccctcgctttagagtgggtgaagtaccctctacctccgtcatgggaagggtggggaaggggaccactccagtccactggcagctctccaagcgaaatcttctatgatctctccctcattaatctttaacttctctggtttactcttgcagtaggtgatgagctgatggttgaaaagtgggtttcacaagctttcagcatgacctgcccaacagactggcacctattgtaatgtgtttggtttggagacaccaatctgagacagaaagagtcctattttaatatcctatttccttggagtccataattgtgcattgtcttcagaacacacctcatgacatatgcattaattggtccatgtttttgtttttgtttttttcagggagcaagagggcctaatggctcagttggtgaaaaggtaaaaaaaaaaaaaaaaaaaaaaaaaaaagaactttcttctccctcctcccctttctttgagtttactataattggactgctgggctggaatattgaacatataaatgtcatggaacagagaggaacacatctcaaaggaattgctcagagaaggcagaacagctggggatggtggggagtaaacacacttcaatgttttctccttcctcacccctccctccaaatgcattcaaatgagtgcatcagcttatctccaggtgaactgtcaattagcaagacagctgtttctgtaccattaagtggtaccgatcagagaattcatcaacctaattaacttcaaggagtgattttctgattcaggcatgcatgttgttccttccatgagtgaacccagggctagataatcagcctgccctctttcctacagggtgaccctggcaacagaggcttacctggacccccggggaaaaagggacaagctggccctcctggggtcatgggacccccagggcctcctggaccccctgggcccccaggccctggatgcacaatgggacttggattcgaggtacttttccccttttctgtggttataaaaatgatgtgtactaagggctactagaaagaccagctagctaaaccctggtctcagggcagaggctgtgcggattcccctgtgagccgccagcttccaacaccacacctggcacaagtaggtgcccaggaactggatctgaaattctcattcttgctccttccccaggataccgaaggctctggaagcacccagctattgaatgaacccaaactctccagaccaacggctgcaattgtaggtcgcctctgaaaccttcattatgagggttgtcacactgtcacactacagtgaggaagctgtgggctgcatcccggctctgccactttcaataactcaccttctctgtgcctccagcccccaactgtgcaatagggaaatgagatgctctttacagcttgtgtctttgaggaacagcatagaagttttgcagaaaacatgatgtgggaagagaacttgaaaatcatttttatctctcttcatctatttctctctctccctctgcctcttctgtctcttaccactaagcatctctactttatttcctccctccagttgccccattcaatgcacacactttgccccaggtcaaagccctgtgctcctggcaggtgcccctccctactgcctccagcccctggcaggtgttgtccatctcctgccatgaagcgatgccggctctcaggaggaccgatcccctggatttcattctctttgttaaatgggccccagagctgagcccttcagtctagcacagattcagggtcaagaggaccctcacccaatgctgggagagggccgctgattctctcactctgtggagtgttgcttccttctgactccagaaggggcatttttcgcttattcttggttcccattgcctgggacaaaataagcataaaagcttagggggagatggtgagacaagaggctagatggaggtgagcaaagtgactagaagaatatttatttttgtttatttttccagggtctcaaaggagagaaaggagaccggggacccaaggtgaggtcacagagccaaggtgggggtgggagggctttccagcctggttctgggagcattatcgctgtacagtgaatttttttctcacttcttgctgctttgaccagggagaaagggggatggatggagccagtattgtgggaccccctgggccgagagggccacctgggcacatcaaggtcttgtctaatgtgagtatcattcaggtcagagcttgtctacatattttccacctttgccaaagggaggagaaggttgtccatgacttcaaagcttctggctatgcaggaggcatgtagccagtgcctggtgttagaacttccacctgccagcacctacctgttcctcccccagttccactgttctctcacatggtgcttctagatttgtctcttctgattagcagcatttggggtcaattgaaaaaacaggctaggagcattagagatgttggggtcttgaggaagccccagataagcagtgcacactttccccagccaagtgcagagcacattgagaaataaagccaaagatgaggaggtaggcccagataccaccttgattactgatggaggttaggtggaaggccttcacccagtgggagagccacatgttcctgccaatcagacggacttgcccatgggttgccagatgtgcttcccagaggcaggcagatctgaaggaaagaagtgtggctgagctgggcatgccccttggtgcttcccaaactgcccatcaggaaggtccctccacctcaccacggagggggtacaggagccaagagaagccaaggattacacccttcatgtcacaggaaacatctttatgtgctccctttagatggctctttgatagtctattaaaactaaaactaaaaatacccattctccaaaatcccacatgggaagatgcccacacaaatggaggaaagcatcctcttcccaactctcctcaacaaggaaggcagtaacttcatccttcaaacccccatcatggtacagcaagtggcctatttacatgtctgactcctccacctgccctctggggctttttttcttctctgtatccccaccactggcctcatagtgctggtttaatcagtgtttgctgaatgaaatgtttggtgtcattgaattctctattcctatgataaatactctggcataagcactcatgggcatgcactctgcatcaggtccatgctaggctctgtgggtataaagataagtaaggccaggcacagtggctcacacctgtaatctcagcactttgagaggccgaggcaggaggactgcttgagcccaagagcttaagaccagcctgggcaacatagcaagaccctgtctctgatattaaaaaagtttctattttaaaaaattaaaaataaagataagtaagacagagttcctgtcttcaaggagcctccagtgaggtcaggagaagggctgtaacagagctgtaactgacaggcaaatgaacataaagaggggaacaagggagaaaagactgtttgggttatgaggaatcaaggaagacttcctagaggaagtatctttgagcagggattggaaagctgagaaggattttaccaggtaggcacggaggacagaacttccaaagctctagtgtcagggatgccctgagccaaagcagagggtaggacaatgtggtgtgctccaggtcgagggagctgactggcagaggatagtgcacatgggtgtgtgtagagaatgatggaaattggagagaaggctggaatgtgggctgggaccagatcgcatgcatttaatattaagacatcacatcatgaaaaatcctggccctttagagagaaataacatcatgctggtagaccacagaaagacaagccccaaataactggaaaaaggatgactaaagttagaagaaaaaaaaaacacgatttttaaaaatcaaatatgtgtaagggtgtggggaaaaaggtaatctcatgtgcttctggtggaagtgtaaattggcccctttggatggctctttggcagtcttttaaagctaaaaatattcatattccaaaattccacatggaaagatctccacacaatatggccgagtgaaaaaagcaagttgaggagtaatacagcctgatgccatttatgtaaaataaccacatggacaaacacacacaccccaacactgtgctttctgtgggtgcatataatatgtatatgtttaaactctaaaaagagaagacattcgtatattgtgtgatttaaaaattaagtaaaggaggaaagtgcgaaggcagctcagagctgttttataagaagggggagggagagctgtgtttggcagtgggctgagggcgttctcagtgtctgcggtgttccgctatgctgggtgactttaattaaagctttgctgccaggaacaaggcagaacacatgccatcctttgtcctcattgtctgatttttctcttttcagtccttgatcaatatcacccatggattcatgaatttctcggacattcctgagctggtggggcctccggttggtatctacagctgccccagaatgtggcttttacccagacgcccctgttgaaacaaagtcgggttactttggaatccttttagctcctgaagcgtagagctagaatatatcaaagtagaatggaaagaaagctttgcattttttgaaaagttgctttcacattaatttgatcatgtggaaagttgtctccaaagcagtggaagcttccagtcctgtgcaccggcaatatgtgtcatggaaattagagaatgctaagtaacaaacagatgacatctgttgcacacttttggcctgcttttatttacattatcttatttcatagtataggaagagcctggagacacctttccttgtgctcaagggaaacgaggaagaaatggactcattctagtctttatagccccattttagaactctggaaattatctgtgtgttaatttccagatctctaaaatgggattataatgtatataagaaatacacattatttttggccagaagtggtggctcacgcctgtaatcccaacactttgggaggctgaggcaggcagatcatgagatcaggagtttgagaccagcctggccaacatgttgaaaccctgtctctactaaaaatacaaaaattagctgggcatggtggcatgtgcctgtaatcctagctacttgggaggctgaggcacgagaatcacttgaacctgggaggcggaggttgcagtgagccaagatcgcactactgcaccccaggctgggtgacaaagtgagactctatctcaaaacaaacaaacaaaaaaaaccaaaatatacattatttctgcaagttggcagagttgactcatggcacaatggccctaagatgaaggaagcttcctcctacagcctgtagaataaatactcattgcatctcccagcatctgctggtcagcacaggagaaaggaaggagctctggccttaggagccttgaggttgcagccccatcttctccacacaccactctgagcccctaattctcttctctgatgacacctcaccagcctttgaggcaacttgtaagaagtgagggatgtgaaactgcttagcacactgtgacgctctgtgcaagtcattgtggagacaggtttatgccttcacagctgtgcaatgccgatgtccctgcctctcctgcagatccccatgaggttgccctgaatcccattcatccagatccaggggaaaatctagtgctgccccaagattcctgcaaatatctgcagactcttctggcaccaggtttctcccctgctgagtgacctcattgtgagccatcttcctgtctcctctgtactgcatccatttgatttctatgaaaaccaataatccaaaatacctcaataatgaaaccctagagcaaaccagctaacaagtgaaagtttcttcccaaggggtctttgttttccccaagctattggaggtttctgatattaggtgggtggatactgaagcaaaacacagagagactaaaaccagagattgggcatccctgtcctcacagtccctgggccttgtctgcctgcattaccatgcctccaccccttctctctcttccttgctttctttccagtcactgtcctccccttggcaaatccagaccctcacagggccccttcttccctaatgctgtgtcaatccgtcttcccagctgtgggaacatgctgaggcctttggaaggggctgggagggagggggtcctgctgactctggaaatgccgctcctaatccagcgtgctctatctttggtgtgtcacaggggccggacgggttgcctgggctgccaggatttccagtaagtaccaccctcgctgtcttctatctgtgccccgtggctgcgatcattctgttccttccacctagaatggcatttcctccatctatgcatgactgagctccaggggcatcttgttcattaactttttcttgatatttttgatagatatggggttttgccatgttgcccaggctggtctggaactcctgagctcaagaaatccatctgcgtcagcctcccaaagtgctgggattacaagcatgagcccctgagcctggctgattttctgaactttttacattttctaaaggcacatatcatatgataacactaaaaatagtgctaactagacgttaaaaaacaaaagagagaatggcaaccatgaccacgattgtgaccatgactctgaccatgattcttggttagcagaagaaaaggccaaacccctaagctccagccccggcttggctgctccaagacctggggcacatttcagagcacactttcctctaaatgagtggtcctgtgttcctgagggagtcccaggctctgcaggagagcctccaggacctccactgcagggagtaaggagggggccaaataggcacattccaggccactgaccttcaataagggaagcttcactggacatatttgtatatattaggctttcatttaagactttatttgggggaaaaaaaaggaaggaaaagagtttcactgctaaacaataataacaaatagttgaaagccactgctgtaatgggtaattcactctttcatccagacaagacaggaacttgtgaaaagttaaaatagcaataaagtgttgaaatgcctttttgaggcagatgtggctgtgtgagtcattgtcacaggcattcagtgtctgttggagttgagaagaggttgcctctggctgcatgtgtggatttggctctgcagaggggtgggtgggcattcctatggggggggtggcatgagtgctggtgcagaagcaatggaggagtgcagagaggctgcgggaagggagtcaacctgatggtgtgggagatgagatgttgatgcctggctgggatgggctggggtgccaggctaaggtacctgggtcccatctcataggtagtggggagccagagaaggggtgggagtcgtggaaggggatagtggaggaggcgggctgcagggtggcctggaggagccgtggggcaagcagatgcagcaggcccagataataggctggatcagtagtgcccagttggaggaaaccaatgttcaaaaaagtgtgaagcctcaaggcctcttaacactcagtgctatcttctttctgccagaccacagtttctggaccacttaaggttaagaaaatgtcataggtaatcatgacttccacctacctgggggatggcagtgtgtattctactgttgagaaaaaatatatttctgattggtttatgcattttaatcttaacgaacaaccaaatactatataacaattccttccagggtcctagaggaccaaaaggtgacactggtttacctggctttccaggactaaaaggagaacaggtaagaggggcccaggtatctgagtgagattgggcgctggaatttgctaaacgtttcagattggctgaaaatagctattaacttttctcttctttgagatacaattcacatgccataaaattcacccctttaaattgtacaattcagtgatttttggtgggctcataaggttgtacaacctcatgaaccactctgtaattctagaacattttcatcataccagaaagaaaccccatacttattagcggtcactctccagctgttaacttttttaatctccaggttctctatgagacgagaaggtacgaagtgggtagtgaaattgatttttaccataatttggaaagagaactcaactcaacactcctttgttctcacacacactgtgctttgtctaaccacctgctgggcatcccccttagaacatgcactgcctgaggacaggcatcctgccagcttcttttccatagctccaatactaatatggggcctggtatacaaatggtactgaatacacttgttggacgaaagcatgtataattaatgagtagaacaaatgttaatatttataaattataaattgagcattctgcagttgaacaacagtcttggtccaaagtctctggaataaatacttagcacacagaacacttcctgagaactcccagggtaccaaacctattgttgtgcttgtattcttttgtgtttgcctcttagaattaactttccagttggtttttatagataagggggagagtgacgtccataaacagattaatatattcactcgtccatgtatatactcatccatctttcgtccactgacccgtgtggtgtgccaggcagtttcctgtgctaggcgtagggatatagaaataagatgaggaagagatatgcaaagagctaacagagcacatgcttacagctggaatggagctctgtgcaaagccagtgggagcactgtgcaaccccctgagcctgccatggggagtcaaggagggtgggtgtgctctgtgggatgggggaactcctctcgttcttctctccccccatcattctataatataatggtctccaaggaggagagggcctccaatatctagtgggccactgctccagggcatggagggctcggtatgctgggtgaaggtttggcatcacgtggggatgtgtcttgggatgcttttcctgccacaggcctgtggagatggaccagggctggccagctcaggcttgggaggaggcccagggaagcaagagcacctcttgctttaaacactctgtttaaacactctgtttcctatgtggtaaggtcagatggatctagagggacggacatgacatccccgccctaacctcctgccaccttgaatgactggtccaggcagccgggcagttctgctctggccattgcagtgaacgtgctttctctcactctgcctctaatgcttttgtgcttgcttcttctccctgctggcgtgctcaggactacctttcctcatcagtggagtggtaagatctaaataccaggtgtgggcttagggggatggaagaaagaggctgctctgcttgctttgatgctactgtcctagctactcccagccccattgaaaagagacttctgtgtggctcagccctgctccccaggggccagcattgaagtttagggccaaagcctcagagtcagatagaaggtttctgcacccagtcttgttctcttgacaatcatcttctcagcagcctctagcatagtagatgtctctgctgaggacaggattggggtcaggatcctgtgttcttgccaccagtctacccatcactcattcctaatgtctgggatagctttgcctaactaagtaagtgtttgcacaggagcttagagtttggaggcaacgttgcatatggagacataaggcctccatgttgacagaggcctctagtttttataccgtcatctctttcctaatttcaggtgttttaacaagaataagtattcttggtgggaacagatctcaggttgagttgctaggaaagcaagctgtcaaatacattgggagccagagcttccttgagggcaccatgtggcaggagatagacaggaccacactggggctggatcctggagggttgagagtgaggatgcaaatctgttatcagtgggagcctgaaggggcatggaagacaggactgtcctgtgccttaggacggtaactctgatggtgcatagagggaatggctgagagaacattcattcatttaggaggctgttgcaatactctagtacgaggtaattttggagcagtggggtttcaagtaggatgaaggcaagagaaataaatcatggctgcaggactcagaggtctctgtacaaggtggcaaggaggagtctctgtacaaaactctctggacaaggtggcaaggaggagtcctgacttcattgagatgttctctgaattgcagggcgagaagggagagccgggtgccatcctgacagaggacattcctctggaaaggctgatggggaaaaaggtaattatgtcaccagaccctgcaggcacatatctgccccagctttgcatctttgtttctgtcccaaacagtgacaagtatatatcttcctgttttagggtgaacctggaatgcatggagccccaggaccaatggtaagtcagagcgtctctcagctggatctgggctggggtttgaagcatttttcatactttgatttggttagatttagttgtcccggttatgaaaattcaaagatgtggcaaagatgtgcaaaatgtgcatatactagggtaaggctgactacaattaaataaacttttcagtgatttaacacaatagcagcttatttctcgctcttgcaaattccactgtggttgttctcagcttggcatctctcctccaagaagtgactcagggatccaggatgcttccattctgtgattctgccatcttgtggattcaaggtcgcacaggagctagcaggctgaagttggggagggggaagagattgtgaaagataataaacatcacttctggcacattctgtaagccaaaacccagatgcttgtggcctcaaaatgtagtttagctgtgtgtccaggaaggagaggtgcacttgcagttataccacagaacttgccagctaaagatgaccaatttcccaggaaaccctcaaaggaaccccacaaaacctctctgggatttttgattctggttgtgaatatgccactcatttgctgtgagaccttgtgcaagccctcttctctctctgggctcctgttttcccatctgcacattgaagagactgaattagtactaaatgatattagggcccttctggccttacggctctgggaatccataacccatctgggcttctgagcagctcttgccatttctctcaagggcgaaccctaaacttacttccctgtgtagaacattctctatgggtcagactgtactgatgcttcacataggtcatctcatttcatcttcacaaccccaagaagtgactctcagaatccccattttatagatgaggaaactaaggcccaaggaggttaagtaacctgcccatgtgacacagcttgtaagtggcagagtggggatttgaggccagccagtcaggctttaggtccagtctcttctcagatgaacctcactgcctctaatgaacatttgaaacattgaacatttgaaacattttgggctagagaattgtatacaggtttgtttggttgaagttggatctcaggtgtggggagaaaggacctcacatttctgtaacagacttgtatccttgaagaatggcctgtaactttcgaggtgaatccttcaaaagaccttctgaggcctttggtccctgaagttaagaagagtggacacccaaagtcaggtagctaagacagactgagagattcttgtattaactactggttaaccacctactaacctccaatactgtggaaaatacaaatagttagtggtgggggtcagcaggctgctgcagatgccatggcggtggttcctactgaagcccagcttggacacagcttgccaaacacaggcagtaagtggcaccttcttctaatttgcatgaaggtgctgtgtgggctagctgtggccctagtgaccagtgtagcttataacgccttctcaaattcactggtgtcctgttacacaaagtgtagaccatgcaccagcatcactgacatcacttgggagcttcttagaactgtagaacctcaggccccacccaagacatactggatctgcatttttaacaagatccaggtgattcttaacacacattgatgtttgggaagtgtattagtccattctcacgctgctatgaagaaataccaagactagataatttacaaagaaaagaggtttaattgactcctagttccgcatggctaggaggccttaggaaacttacaattgtggtgggaggcatctcatcacagggcagcaggagagagaataagtgccagcaggggaaatgccagacacttacaaaaccatcagagctagggagaactcattcactgttatgagaacagcatggggaaatctgcctccatgattcgattacctcccaccacgtccctcccatgacatgcgggggttgtggaattacaattcaagaagagatttgggtgggcacacaaagccaaaccatatcaggaagtgttgcactagaacataccaaccaagtggcctgtgccctgtcaaccccatctgtctttgcttttctttccctaagagtaatacagactgggtactttacgtactgaccctgtttcaactcagtttttgtttgtcatttttcagagcatggctatgtatgtttatggtaggatgaaaagggacttggagtgccccaggcttaaatcagtcattcttctgggagacacagcagacccagctacagggttggaaaggcgcagactgagggtagaatttgttctaggaagacatacatcatcagtggtgttgtctgtcaaccaagtagtttacatcccagacattagaaggcaggagggttcctgaaggttgcaacagaacagtggttctagaagcctgtggtcctggaaagccagcactgaaatagggtccatggtctggaactcagctggatgactggggtgtcagaccaagactctggttcctaggggcaggttagagcaaggaaggaaccaaatcctagagtgggttatcaggccaggctggcctgaggggcgaggcagggctgcgttattcagaatgggggatgcgataagccctgggacataagacctagggcagaggtccatgttctgggctggcccagcacctggctaccagggagctgaggccctgagctactgacctcttgctccttagttaaccctgactgcgaggggctgggtccagagtctggggtgggttggagcctgcaggaaagcaggggatggtgtgggttgagcaggtgcttctagctgagagcggagaggctggagacaaggaggccgcaggcaggggcttctacctggctccctgccctccttcctcctgtcagtggatcatcgtcaccactgcctgcaaaagcgggcttgcactcctcatttccctgaaccaagactttctgttcttttctaatctggcatttgttttgcctctaggggcccaaaggaccaccaggacataaaggagaatttggccttcccgggcgacctgtaggtatcagtgttcattggacaggctggagggggaggacacgtgggccaggctggtctgtgggcggagggtttactgaggtgtctgctgtgggttccagggtcgcccaggactgaatggcctcaagggtaccaaaggagatccaggggtcattatgcaggtgagtcaccctggggatggagccggaggttggtgtccagagagggtgagagagtgtggggtccacagagcagggcctgtggactgaatgttcaggaatgttgttcttcttccttcactgccactgccaaaggtcctcccacccagccctgtccttcagctccctctcaggagggtcctgccacctaaaacaccttagtggaaaatagactttcttgtgtaggacccagagggagtaggggagaaagggatctggtcatgctcagaaaatgtggttccaaatcccagggcctctaactctagggtaatgtcacctctcccctcctttacacagtcccagggatcactcacatcactaggggctcagtgagtgctggaagtcagtatcaaaggcagatcagctacttaggtggggcctcccaggttggcaaacactgggcagcagcagggaccctggtctagaagaaaaaagccaatgtttattcagcagctgctgtgtaccagacactgtgcaaagtgattttgttttgttttgttttgttttgttttattattattatactttaagttctagggtacatgtgcacaacatgcaggtttgttacatatgtatacatgtgccattttggtgtgctgcacccattaactcgtcatttagcattaggtatatcttctaatgctatccctcccccctccccccaccccacaacagtccccggagtgtgatgtttcccttcctgtgtccatgtgttttaaggagagtttctcatttagtcttggtgataactattgcatgagatactatgcagggatcttgttttacataagaggataccagggcctctagaagtcaaggcacccacccaaggtgacccagctaataatccccaaaccaagatgtaaacacagctctaagtctattgctgcttctgtttgtgccacactgcttttgctttgtatgcccagaaatccagaaatactattttcctgaagcattaggggttgagtctcactcaccaagcccactggaaccggcaggcaaaccagacactgacgccttcatttagagtgatcaatacactttctgcatgaactaaactcttcatgcctgccctcagagcctcacctctcctgctgcaagctcctgcctctaggcttagaggagaaactgttgcatggtactaaggccaagctggcttcactttgaaaatgactgtgctatctaacaagagttttgcatttatgcttgcatttctgagacacatttcctctggcaatatatcacatgagggacccccacagtccattcccacccgtatactgggaatgcactgataggggagccttaggctcagtatcaactgggtgtcagaatctgagttgcaatctcagttctgctgtaagttgctgtgtggtcttgagcaggtcacctcccctctctgggcctcattagctgcatgtgttaaccagagacaatacttgttgccctgccatcttccctatggtttgttgtgaagatacagtgaggccagggacatagaagtgctctgtggctccctgagcaacctgagagagaagttggttggcttcagcagaccctcctttccttcctctggaggaagtgtcctgtggctgcccctgcattcacaacaacctgaactaatggaatggcctttttttcttccttcagggcccacctggcttacctggccctccaggcccccctgggccacctggagctgtgattaacatcaaaggagtaagttggcacgcagtgggaagaccttcccaattggcctaagctggagtcaggtgtcctgttgacctcacctctcttgttctcattacccacaggccattttcccaatacccgtccgaccacactgcaaaatgccagtaagtagcaatcactgccttaaagagcaggctttggcatggatagcaacttggagaaaaagatcagtctttgtcttgggccctttctatcctcaaatgtcctctctgatgtcttctgtcccctaagtgtagaccctcaagtgactagaagcttttagataacaggtcgtggcaatgaaatatactggatcttctaagggtgcacacacggtgaggtgcttcttttcatacaatctaaaaagcagtgtcttttgttattgcgaccacattagcttcatgcttggagtagtataaaactgggaaaaatagacccgttagaaaacatagattagaaaacaatccatgccaacccatgatctttgcattgagaactttgtaactaactatgctgccctttcccagtgatcacatcactgcaccgcacacaacactgacaggcagggctgatctctcccattttatgataatgaaacaaactgtgactcagagaagctcactggcttgtccaaggtcatgggacttgactgagctgggatcataactcaggtctcctaaccaccaggcagcaggtgcagacactgggatgctgaggggtcaggcacttgcccggccccccagccattgagcagctctgtccctgattttttacccacaggaagagagtcagatttctgtgagaaaacccagtggggagggtgggccttgtgtacaggccttagtcacagaaccatgcataatcattctctcattcattcgacaaatatttattgagcacttatgcagtgctaaggactctgccaggccctggggacacaacggtgaactagacggatgtggcctctgctctcaggagcttgcaaattacaatttagaaatattctttgaggtgagttcgtaattgatccctgttggaggtgatgttaaggcttgggtcatagccttcaaaatgacgcagtttggccgcgtatttgcccagacatctggctaagtctaaacgttgaggcatccaagtctgcagctcagggcctgggaactctggcctagagggcaggacccacctatgtcaggtgactaacgggctccaggctctacatggagacaacagcaacccagtatgtgtttatatccatggcctgaagagaaacataaaatctcagtgctggagtgaccttcctgggcagtcgctgcatcccacctgcttatcacacaggagagaccacacagcccagagaagcaaaaggctggctccaggtcacacagtgagtcagtacagcagcctctcctaactaacatgatttcaggcctcaaatgagccagccacagaacagcacttgacaaattttagagtgcggtaaaaatgctactgcaattatcatgacctgcaccaggacctctcacagtaaccatggcctttgggggtcgtggggatacctaaaagaaggaaaagataggctcaaagcatttttagtaagattttttacttcatattgcctggctagatactgtaggagctgggtcatagacgtttcttgtccaactctcaaaatggacattttgaaacagaaatgcttcctcttacagccagcatctcatgagccccttctagtttcagctccttccaacaccctaatcatttacagctcatgtctgtagtggagaaactttatcagcatagcctgcaagataacagcttggagctgcaactttcatccttaacttagaaatgtttttcctggtagatttcctccccactcccatcttttcttgatggcccctgagcagcttgtgaccctccacccgtaagcacagaaggattttggcaccatacggatgactttgattctacacatcaattgggaagaagccaggtttcaagtggctttgtctgaatagagaaggaaatgcaggaatctggggaaaactgggaaggaatattatccagaacagcctggactccagacccctgaaacttaatgaggtgtccagaatagcacccccaatctaatgataaccccctttgctaattacctgcccatgatgctcatctttgattacatgcaatagctaagctaatggctgacccggtttcacggttgggcatgtcacttgctcggatgcttgaccttacacatgaatcaatcccaactgataagaaaggaagacaagaatgttcacagttggccaaaccaccactgccacgatttgttgtcttaaagctttgggcttccttatggctgagttttttggccattaggcctcagctctgtctccccagctcaactacatcatgggtctcccagtttaaagcctgggatgtctgtgcattgacaactcctggggactcagggctttgggggactccagagccaaaggaaggcctgactctgtggcattgcctcttttgtcacatgcccccgggacagtggctgcctgtttctgcaaacaccacggcagagcttgcagtgcctaacctggccttcctctctttccaggttgatactgctcatcctgggagtccagagctcatcacttttcacggtatacactcccttcttcatcatttgtttctctgggacatctccttgaggaagatggttttcctttgcccagtgcagggcgcagactaggtggtcaggaaggtctaactggatgctgtaggggtggggatggcagctgagccaaggctgtggggctgtgcacctctctttggtttggtcacacatgtgcctattctgctcatcttagctgagcctcctagttggcaacaagcactctgttctttcaattgttcatttgttcataaaacattcactgatgcctattccttacttggtatgatctgcactgggctgaggcagattccaagagcctgagaagcgctgttcctgcctctcaggctcttggaacctgttaagtgaaactactttaaaaacaattatagtgcattatactaagagctgatcagggaagggccgtgggagctcaggagacccttgcctcggtgtccatgcaactttgtaagcatctcctgggagcttgttagaaatgcagaacttcaggccccaccctagacctgctgaatcagaacccgtgttttaaccatctcccgggtgaggtgagtgcacagcaaagtgtgagaaatgctggctcagagggtttgagtagtaaatgtcagcatattcatagccacatgcaggagctttgctatggcacatcagaaaggcacaggccaggggatggggcctgcaggtgagcagtcactctggtccccctgtcctcacacaccctgtcacgccacttggggtttaaatagaggaaggtctttttcctccaatattcactttcagcttggctgtgtcaccccggcccacgaggtggtggtctccctgatgatatctagccctgtggtttttctgtcacttctgcttaccaagcccagcctgtttgcaaactctatgcttagattcagttcaaggctcccctttcccctgatgcaaggtggaccttggggagcaggggatggagctggatttgttttctcagattccccaattgttcctcttccctgtgagcctcccctggaaggagggggagggaacagatctttctggatgtgacagctcctagtgagcaatcatcctgcttactgtgtgcagctactactgctccggttggtgctggtgcacttgctgtcttctcttctgatcactgctgtctgtgggctcagtgtgggtgaaggaggccccatgggccccactgcgcaggtcattggtctcacacagcattcccagggttggagaggcctcgacagatgtagttgccgctccctactgaccccctgttgacaccatcattcctgtgatgctcatattccctccccttcattgagaaagcctgagtcgctagcctcatctacactttgtggccccatctctaggctcaagaccattggtgggttgatctgtcacacctcttgggaacgaggaattcaaagacctagcgtccaccctacccatcaaggtggggaaagggaaccacttcccttcccaagcagtgatctcccaaaaggctttcctccatgccccctcccatataaagagttgaggggaaaggtggggatggaatgccagttctgcagaaacagtgtttctcactagtcctgtggggatgtacaacacttcatggtgggcattctcacaactttgtacgtagaaaacttagcgcccttggttgtcctgtgcgggcactcttgggagagccctcctgttcccttacaaccccacgctacacaggcctagatgagatgagtctggaagattgacatggtgctgagtctctgtcttcatttgtggcactgaccaagccagggttagccgcagcctctgctgcactcacgggatgcgctgctggaacctcagtgagagcacatatttcatcttgccttgcgttactgtgagctctgtctgtctcccagtagactgagcttttcaaggttgagaatgtgtctgaagcatctacctctgccctctttatgattttacacttgctgatctctcaggagggctttgtttgagtggactttgctaaatgagcttagtttgaaaacctgtctcagaaaggttttatatagaaagaaggtgattttccatttttttttaacatgtatgtgtttggtggcaggtgttaaaggagagaaaggatcctggggtcttcctggctcaaagggagaaaaaggcgaccagggagcccagggaccaccaggtattccagctcttgttctcaatcttgcctttgattttttgctcctgagaacaaatgcgactgagaaatgtgacctagccagagggtaagactaatgacattccaccctgaccacaggctccactggtttctagtgaaaaccaagcatgggcctggcatgtccaatagggaacattgtcaagagagaccagaaaatccaatcattcatcttttatatgcaaaacaatgtccaaagaaggccagggacctacctgggatcccacagtgtctgggttgatgggcccacagtagctagcacctgtttctgcttccaagcagactctgttagccaacccagtgcaggctcacatccactaagatgtaactgtggttgccaacttagagacttttattttaaaatttctgaaattacaatcgtgaattttacgaagcatttctttttcaggtcctccacttgatctagcttacctgagacactttctgaacaacttgaaggtgagtatttctctaccaatatttggcctgtgtttttcaggttttggtttatgtcagagactgagttcatcccactcttactgaaatattcctgtgttctctgcttccagggggagaatggagacaaggggttcaaaggtgaaaaaggagaaaaaggagacattaatggcagcttccttatgtctgggcctccaggcctgcccggaaatccaggcccggctgtgagtagagacccctccaagtcatctaccccaaagacttacagctttcccggaagcccccaatgggactaggcagttagggctagtcattgtactataagctggaggcagagcttggggattagccagctctttccccatccttgttgattgatgggcaggttggctgaggtccctggagagaaggtagctggtcaaggccacatgaaggtaggtaacttccaggccattagtcacactgccttattcatgacattggtggaaaattcactccacacaaagaatgattaatggtgaatgcatcagataacagaagcagaatggaaggtaaggagatatttttagaggagctgtttgattcttctgaaattttatcaaaggagctcctagataggtgtggttttcctaggatgagagatttttccaggtgaaaggagagaaagtcaagctgtgcccccaacaagaatatgactagatcattgacctttggtcccagagctcactgtgagggtagaaccagcaaagccagagatcagagttctgcctctagctctgcatctaatttgcttcatgatcttgggcaagtcctttcacttctctgggcttcagtgtctccatctgtgaaatgcaaaggctagactagatgatctccaaggtcccttctgcctccaggagtctctggggttctctgtagaatcattcaacataatgactgggctgccatcttggaggccttaccccaccttgaattgtgcccaagattgaggatagtaataacaatagctggtgtttattgatttcttttaaatattctcataaaaggactagatgggacttcgagtgatgaatgatgctttctctctgttattgtgtgcttgccttgacagggccaaaaaggggagacagtcgttgggccccaaggacccccaggtgctcctggtctgcctgggccacctggctttggaagacctggtgatcctgggccaccggggcccccggggccaccaggacctccagctatcctgggagcaggttagtgccgtaaacagtgcccttgttcacgctgtccctaccattgtgttcaaggtcacagcatctgggtggcttgtcacagctgcactgcctaacagagggctttcctggataccgccttctttcttttttttttaattgagatacaatttgcacatcataaaattcacccacctaaagtgtctaatccagtagtttttaatatattcatgaagttatgcagtcatcaccactgtctaattctagaccattttcatcacaccaaaaagaaatttcataccaattagcagttgttctcttttctctctttccctctcctccaccagatctgggcaaccatgaatctacttctgtctccagatttgcctattctggacatttcatataaatggaatcatataatatatggccctttgagtctggcttctttcacttaacacagtgttttcaaggttcacccatgttgcagcacggagttcattccttactgtggccaaataatattgcattgtataggatatacattttgtttattcattaatctgttcatggacatttgggttgtttctactttttggctattatgaataatgctactatgaactttcgtgtacaagtttttatgtgaacatgttttccgttctcttcagtatatacgtaggagaaattgctgggtcatatggtaactctatgtttaactttttgaggaactgccagactgttttccgaaggagtcacaacatttctcattcccatcagcagtggcagtgtatgagggggttccaatttctcctcccatattatggtatcctcattgtatctttttgattatagccatcctacttggtatgaagtgatatctcactgtggttttggtttgcatttccctaatgactaatgatgttgagcatcttttcacatgtgagtggaaacttcctggctgctttgtcaatgccttaggggcgtgagaacctgtcttaatgaccagcagtgactggaactctgtatataaaaatctattcatcctttagagcctcacctcctcatatgcaaaactggcaaaattaaagaaaatctctatgtaatgagcatgtatcagatgccaggcattttgctaatcactttgctatggtattttattgaaacctcacaacaacgctttaaaaaaagcattaacatccccattgtacaggtaaggaaagtgaggcccagagacatttaggaacctttccaaggtcacacagctaataagtgacaccaacaggattcagacccagagcagtgtagctccaaagcctgtgttatttctactatgtccattggaggagacaataatagcagcaataatagcatgaaggcatacttttttgttgtttggcttggcaggagccaggtatggtggaagcatacctggaaagagacctacagagtccttggcataaggagagctttacacaggaggtgactttggggctggggctttgacttagccttggatcttttggctgcaagtgatagaaacgtaactcaaagtagctcaagcaaaggggaaatgtactgggtgtgaaggagggagtgaacagtcaacttgtgggagaggtagataaacagctggacctcaggaacagccagagccagggactcaacccctgcaaggattctctggccatctcttgtctcggcttctctctgcatgcagtttcacgcttcctcaccacaaaccacatcctctgcacagcgggaaatatggttactgacaacttacagcttccactgtcagctagaaatcttgaacttcttttactattttagtttgaaaagtcctgggatggggaagtcctagagaagggtcctgatgggcctgacttgggtgaggtacccaatcttggacaaatcacctatgaccaggaggtcggatcacatgagaacatggtagctctttctggaaccaaatggttgtagaggtgaagggaaggtcccaagagaaggagatgaggacactggtcctacaaaggaagaaggtgccgagtggatggaaccacaggtgcccacacagccatgagggaggagtaggactacaggaggtggaggcatattacagggtgagtgcaaggtggagaaaaactgttgtccacagcaacactacattagggctgccgggatgccttgctgcattgagcaaggattgcttctcacataatgtatagcaattcagtttacaaaacactttcatggccattatcccatgtagtcttcacagcaaccctgggaggaagataaaacagatattattataaaattcatctcacggatgaagacactgaagctcacagaggtgaagagacttacttgaggtcacaaattctattaggaggcatggctgggatccaaatccgagtccactggccctctatccactagacatttgccacctgtgtgtgggtgttcaagtcctatgttggaactgaacatttgcttgcaacgacctgaaggactgtataattttactggggcttgtaaaaacacccttaattctgccaagagcttggcagatttggaggagttgtcgggggtagggtgagcagaggatgagagaggtagaagaacagccaaaggaatagttgtaattatactactttatgtttgcctaaagtaagggcttttcagttgaggaatcatagactcctagagagttcaaggatatacctccaggatttgtcatcccagtaatatttttttatagaattatgtgtgcatttctctgggaaagagggcactaaccttgatctgatttttaagggcactgtgactcttcaaaagctaagagctcctggccggatgaatgctgtacatgtacaattttcaaagcactcagttctcaccgcagcccagggaagaagaaatgcctattttacattttgcagatgaggaaacagctttggagagcttgctgtttcctcgagatcacacagctaggaatggacaaacttaaggacttgagtccatgtctctggccccaaggccagggctactgtcactgcaccaccctggtctcctcccactccctagagccttctcttcctctttctgagcctgcttcctctgttcagtgtcacatgcttgtctcttgggtgaaataagttatatgagtcaggacatttttgaatgcaagtgacaaaatattcaacttaagctggcttttataaaacaaccacaaaaggaattgattcacttatgaaacggaaaagcactagccatggcttcatccagggtaacaatcaagaatcccagctcttccctgaaccagtcaatgtggcctaagtcacacgctgggggcacagcacccaagatacaggtggaagttgggatgctttgtggcgctgtgaatggggttgaacacacttctctccgggagtcagctgatacctcagacatttttcagagtgtggtttttgtgtaacttctcttttctgttttgtcttagctgtggcccttccaggtccccctggccctccaggacagccagggcttcccggatccagaaacctggtcagtattatcatcagtgtgtagtcatcattccatttgggatagatatacttaaaactctgcctacgatctcctgtgtctgacatcccttggggatcaggccttcatgatagtaggcttggtgcaattccataaatagtagaagggatttgttatctatttggatgacttattaagtaaaaagacgtgaaaaaacaaaatcatgtatatgtaagttccaccattcgaatccttaattgactaagttataacaagaaccaatcatattacttatatatttatatatatatatatatatattttttttttttgctggatgaggggtggacggggtctcactctgtcacccaaactggagtacagtggtgagatcacggctcactgcagcctcaacctccctgagctcaggtaatcctctcatctcagcctccagagtagctgggactacagatgcacactaccacacctggctaatttttttttttttttttttgtagagacagggtttttgttacattgcccaggctggccttgaactcatgggccaccaaggtgattctcccaccttggcctcccaaagtgctgggagtacagacacgagccaccacgcctggccaccaataatagtatttcaaaaagcataaacctgctcgggtgcggtggctcactcctgtaatcccagcactttgagaggctgaagcaggagaatcacttgagtctaggagttcaagactagcctgggcaacatagtgagatcctgcctctacagaaaaatgtaaaaattaactgggtgtggtggtgcatatctgtagtcccagctacttgagaagctaaggatcacttgagcctgggaagtcgaggctccagtgaaccatgactgtgccactgcactccagcctgggtgaaaaagcaataccccatctctagaaaaaaaagaaaaaacaaaacaacaaaagcccaagagcataaacaatgttacaacaggtccttgtgctggtcagatttacttggataattcagtcttctccattctgccaaagaacatctctggcacattcgttaccctgcagttcgttggaacaagacatagcactccaagattactgtaatgcacagaaaaatggacaaatacttcacaaggatgtcaggagtccaaaaatgctctttgatctttgctggatgttagttgcaaaatttggctgccaaaagaaagaactgtcctacatatgatggaattctgatatttggttcccttggggatatctaagtcattttgatgcacaaagccattatcttcaaggctaggtgaaaattaatattttataatctttctcagttacaatgaaaaataaaaactctcttggccgttatttctttgagatttgatgctattcaatagatttttgtagcttctgtatgtgcttctagatatgccaaatggctgtctaatctttggcacttttctaggcagagaaattacagacctccattttctatcatgcatttaatgtaactaccaagctagacaaaaaagatttaagaccttaagtatagttgctcacttgcttgcctttcttattccaaatgaaaaatttgaaactcttcaaggaccagcatgaagtaacaccatttaaccatgttagtgccaccaagtagcttaaaaaaatagaagtggtaaaacttaccagtgcttttgctaatacccaaaccaaaacaaagataactccattgacaatttgtaaatgtctttatactcacataatattgtcatttttgttttaattcatttattataagttagatttgtgtttcaaagtatacatgtttttgttttatcaagaagaatgccctttagttactaatgaaggtatatacctctatctggcacattaacaagcctctttattgagtatctggggacggctcctagttgactttacagagaggccaggttatcagatggtgccattcctctaatgataatggcagtgtttggaatttaaatgatctgacaggtcacagcattcagcaacatggatgacatgctgcagaaagcgcatttggttatagaaggaacattcatctacctgagggacagcactgagtttttcattcgtgttagagatggctggaaaaaattacaggtaatttctaaacttcctttaacacactgccttcaaataccctctaaaaataataatctactcccataaatgccatttttttctgttttgaaatgggagaagtttgtaattgatctttcatttcaatgtactgtttttcttaaagctgggagaactgatccccattcctgccgacagccctccaccccctgcgctttccagcaacgtgagtagttaccctgttggactgctcatgcattcatttatcagcatttcctgagtcctccttggtatctagcaccaagctctccaaactctggacagtcagctgtgcacggtttagtatctggtgaaatcctagaaattaatgggtgctaacaggaggttcccacagtagagcggaggaataactagatccagaggctggagacctgctgttcccatgtagtagccaaatcttcttgggcagagggcttcctctatcttggcctcagtttgttcatctgtggaatcattggttggtataagcaatctagaagattcctttaatttttggcaccatctgcctcataagaacatgggcaactggcattgtccatcttctagccctagagcaatgctttgaggtgggtactatcatccccgttttgcagattatgaaactgaggctctgaagaggtagctttctctattaagtgaaagagttggtgattaaacatgggtttatcaaaaagaatgcccttccttgattcagtgctctttttaaaactcttgagaacattttctccctttctgaagatgatttcttcagcaggtcatgaaactctttacagttaagagtcacagttacagacaatggcaaattatttaaagcatcttctcaagaaacattgcacttgcacctcaatacactctgaagaacagattgaatgcatattcagaactgtttcttttcctccttttcataacagccacatcagcttctgcctccaccaaaccctatttcaagtgccaattatgagaagcctgctgtaagtacaatttatacatttaatcttcaaatactgagtgtatatctgctaagtgctaggtctcatgcttagtacacagttcctaccatcatgatacttatagactagtgagagaggcaaacaaaaaacagagaattacaatacagtgtggtaagttgtttgggtgaaccaagcacagggtgctgggggtataagggagggcagagacgtctacctggaggaggttacctccaaactaagacccaaaggacagctgagttcgggagtgagccaggtgggagagaggcaaagggaagatggaatagagggaggtaaggggaagggctgtgcattcctgtaattgctagtattaaattacaggcaaaagagtagagttcaaggcagaaaagggagacatttagtctgtggaagtcagcaaagcaagtgctaggtttcaagggtctgcaagccaagccaaaaagtttgaccattttctgtgggcaatggggagctacagaagggtttaaagcaggaaacaggtatgacaacactagtgtttcagaaattaccttggctacagtgtgcagattaatcagaagggacaggagcaggggtccaaaggccagttaggtgactcctgtgttatctgaactagaatcacagcagtgagcccatagactagtgggcaattggagagacatgaaggaagcagaagtgactaattgggtcattgattgaatatggcgcattaaagatgagaaaggtcaagaatgatgcccaggtttctgcttggatgattgagtggtgacagtttcctttccagggattgtttcattgctgggattagaaagtctctctattcctttgctagcttaagtaaagatctcgtttaaatcagcatagaaacctcatggaactccatcacaggaagaacagccaggcctgggactcttgtctctattagtctgctttgctctctctatagaccaccttctgaaagggtctttcttcctcccaacctcaccccaaaacacatatataggtgacatgagcttgcacacagctttgggtcaccctggcactgattcttgccctaagtctgtgtgatcttacagctgctgaccccagtactactgactcagttcagagtcttgggagagatagtttatatggtctgtcttgggtcaattgcccactcccagcccaatcaagagttaccaggagaatgagtttgaaggtctaaggccactccttatggcagggattgtgggggcattttctattgtgctgctattgaccaaggaggaactaatttggagcatggtgagtctgaggtgcctggaggaaacctgagtggagactaccaggaaggaataggttctgaaggtctgaaaccccacagtgggatcttggctgtagatgagccatgcaattactacggggctggttggattcccaaaagagaatctatacagtcagaagggattagactatgaggagcaaaactgaaaaggaactgatgggagaaatatgagaaagaaactgagaagccatagccagaaaggaagaaagcaagccaagcaaggtagtagccaacagtgtcaaaggctgccaggaaattcataagaagaaccaaaaggtgtccttcaaatttagaaactagagcaaagcatttagtagccaaaaagattctagttggttgaagagtcagtgggaagtgaaggaagagaaatgtgagtgtcagtaacccttcaaaaagccccaaagttagggcagtagctaaaggattttttaaatggtattttataaattcagaactaatacgtattcattgcagaaaatgtcaacaatgcatgaaaagaatggagaagaaaatagtaacacacctacaattttatcaaaactacaaccatccacaaaatagcaattttaacattttgagtgttataacattactgtcttcctaaaagtacaatataaaaatgttgtcattttataaaaatgttccagcaattagagaaatacaaacatgagaacacaaaaacccccaatctcgtcattcagaaacaaccgtaatttcagacatttctctgtgtctctctaaaggacagtagggcttggtgggattagaggtggcaaggaagccctgcagttgccccctgcctgtgcctttcttaggtggcccctggcattggggaagcctcattccatcaaggcctcgtgtgatgcactctgatgtagccccaaagcacactggttggaagatgatgagaccatagggcttcttccctcaggcaccagagtctccagatgcatgaggaagaagacggggggtgggggcagtatagtcagatggcaaggacatcaaagggtcagggtgtatatgtggaggtggaagtctggtggcctgcctgtgattgtggtgggtgggcagcatgctaaagctccctcttaccctaatggctgggaatgtagagcataaaatgctagccactgggaggcctgctggggaagccttggctcagtgcggggcaggaaggagatggggatggggtgtgatgctgcttgacctggacctccatctagtatggtggtcaagacagaaccaggatgaataaaaagagagagactggagcaggtggcagccttggggtctgtcctctgcaggaaggaaaggggtggtgaatggagaaaaatatccagagatgtgcaagggctgcttggggccagtctggacactcactgtagctcatggccagttgtggccaactggctggaagctggagaagcagaagaccaccatggtgatcctggtcactgggacacacagaggctttgttcaggtctgagaggcggggtagaaaccaggagagaaacactggccgcctcctgccccaccgcctgagcctcatttcatgtcctttggcttaagatatttaaaaatattttcctttttggtaacttggacccaggtcctgcaccagcctctcagctctaagttgatgagataaaagttacccccgagatgagattgatgggaggcagggagatgagtgttccttgattatggaatgcattccagagggtgtggcagaaaggctgagagagggcagtagtaggaggctgggttttgggagagaaagtgtggaagaaatagactacggattggtttttattttggctgctgaccaagatagcagggatgtgaagctggaattactataagacccctagttccagaagggtctatctcagcagtcttagtcataggtgccatacccttctttcgatggctttctcccagatccctcatgtgatcagccccaggcctatccaggagatggaagaaagggctgcaggcagatagctgggagaagctctgggatccagggccaaagccagcttaaaacccctgcacagacccagaggtctcaaacttatggcctgcaggtggattccgagattcagatccctgaagttctttatttggtccaagcaatattttgttctgtttttttttttttttttttttttttcacctaaggaagacatttctaccacttagagctgttcagagagctgaaacaggctgcttgggagaccatagctctccttccccggaaatggtcaggcagagactgtaattccaatgtcagggagggattgaataaaatgacctccaacgtgccttccagcctaagaagtctggaatctttgcaggaatgtgagatggttctgggggctggagtttgcctttgattctgactgctctcttttgtctcacatttttcagctgcatttggctgctctgaacatgccattttctggggacattcgagctgattttcagtgcttcaagcaggccagagctgcaggactgttgtccacctaccgagcattcttatcttcccatttgcaagatctgtccaccattgtgaggaaagcagagagatacagccttcccatagtgaacctcaaggtaaaaataaatatggttcccattgccttctgcatgcattggtcgctacagggcctggaggcagttttcattcctgacatcaacagaagactgttgacttaagcctgctctctcccttactggctatgtcactttgggtgggttctttgccttccctgaacctcagttttctttatgcttgtgtgacccttgaagcatgcaggaggagagatagtgataacttctttcattgatacagggttttcttgtttgtttacaaagtacctcattatcttaatagggacttctaataaacatgagagttattcattttttagtttgtcagatgagaaaactgaggctcagaagaagaaaccagtttgcttaaaatcactgcaaactagggcactttgtcctgaaccctgttttggtgttctgtgcccatttaagcagatatttctctgccccatttgtgggtaagacagggccttgtaggatccctcgattattccatagaaatagcagactctttcaaggctatgcagagaaacctcgttgccactcacatacaccgtggagaagctctgggtcctgatgactgtttcttaaaggtacttcaagaccctttagtctctgcaaccccagtactccaatttaaaaccttgaggctagcaagttccatcctaaccccatacccagcactttccacctcctctcccagaattctgttccagcaccttcacccactgaaattatttttattcttggatctctctacaagggaccaggctgtttcaggaaaaggactaaaaagttcatctccatctcacccacagtgtagactggcacaaggcctgccacaaatttgaagcttagtatgtatgcataatattttcaaaataacaataataaaataaagacataaaacacaattttgattggaaggaggcttgtatacacttctaataagagaaattccctcaagaaataagacagtaaaagcaaaagcgttcatggatggattataaaatcaaaccacaaacatttcttgagttttcactctgtccaggctctaggattggggctggagactctaatgtgaggtggcatctgggccttgaagagcgagtaaaaatcggccaagtgtggtggtgcatgcctgtattcccagcactttgggaggccgaggtgggtggatcacctgaggtcaggagttcgagaccagcctgaccaacatgaagaaaccctgcctctactaaaaatacaaaattagccgggtatggtggtgcatgcctgtaatcccagctactcgggaggctgaggcaggagaatcacttgaacctgggaggtggaggttgcagtgagccaagatcccaccattgcactccagcctggctggatgacaaaagcgaaactgtgtcaaaaaaaaaaaaaaaaaaagagtaaaaatctaactcatttgtaggctgatggtataatgattctaatgtggtattttgtctctatagggccaagtactttttaataattgggactcaattttttctggccacggaggtcagttcaatatgcatattccaatatactcctttgatggtcgagacataatgacagatccttcttggtaagtgagggtggaagttctcagatatggtgtgatagatagttttagggggcatcctaacaatgggatgcctttatcagctgcttctctaggatattgccaacataaagccacagtgaggcaactgagggcctcagagaaagccttgtccttggagtcagaagacccaggtccagtaactcaatatggaatcctgggcaagacatttccattctctgagcctcagctgccttacctgtcaaatgggcaacataaccacatctatgtcatagaattgtgagaataaaatgaatatatgtgaaaacatatagcacgcagtgggcacataataagtggtaagcaatgcaactcctggggatcctgtaactctacactgtgatttgcactctaaatcttgaaaattatgtgagtttttcagaatagaacaactcagcaaacctctcctcactgcctactctatacgaggcctgaggccaggcctggaaggcacaataataaacccacacagctcctacttttacagggctcacagtctacagaggaaatagacacacactaactgtgactctagacagaatattgtaattgtaagtggagaaacaggtaccataggatatacaggatatgtttgttttcatttttacttaggggtgagaatcagagatggcttcctgcaagaggaagttgtttattggcctttgaaagatgagaaggagtcactggtctgaaaatgaaagagaagccctccagaccaagggaccccatgagcaaaggtttagattcacaaaagaagagggtgtgatttgaaaacaactgcaagctgggtgtggctgcaatctagtgtgttaagaaagctagcaagggcaatgaggatagagaagtgatttggcatcagggttaaggagtttaacttgattcattagacttatgccaatttgcttaccaaaaaataccacaaagaagtgtcattttgaaaaataacatgacaaaattactttataggccccagaaagtcatttggcatggctccagcccccatggcgtccgccttgtggataactactgtgaagcatggcgaaccgcggacacagcggtcacgggacttgcctccccgctgagcacggggaagattctggaccagaaagcatacagctgtgctaatcggctaattgtcctatgtatcgaaaacagtttcatgacagacgctaggaagtaatggccttctgatgattcttaaagagttttcaattttttcttatgtgaagagttgacactgaaatctaaaatgtttaattgttgtaaatattacagtttttttttttttactacatattctttacaacagcaaccaaagaaaacatacctcaatacactcaaaactgaagacatagaggactcagatcaaagacaaaatctgatccatatattggtgctagattctgcaggaaaccccagcagtgtgaacgcatcccaacataggttaagagcaagttgaaaacaaaggccatggcattctgccactgcatccttcagacagttatatcctccttttaaaccattgttgttgagtgtaagatgtccttcatgttttcttataaagtcagtgtttagaaatgttaccctttctaagttatatacagatcaaatgcttttttctttcacgtacatccatcatttgcaactgctgttcgtacacagaaacaggactgctcaaatgatcctatttgtattttctgatgctatcagactctaatgtttttttccctaaaatattattgccatcatgctttaggaattttatatttttacacaatcatattttagtatggtgtctgtttatgtaactctgacttgctggaaaagttgaaactccaaataatctgaaactagaaaagaaatagcacataattactaccttccccttggcggctctcctccccaacccccaccccacaattttatgacttccatttggcaattgttgaattataactgcgactgaaacaaacaggttcatagagatgaattttctgagaaacatatatctacatgttgtataattggattttttttccatgtaagtgaacataaaaacatcttttccgggtgctttcttcatttgactttttcccgctagttcctttattctccatcactgatgtggaagcagacctggggtgggtttgctaatcctgccacttgtgctgcccccaggcgatgatcagagaactgaaacgttttcccatcatgctcatctgccctggctgttgtcttccacctagtggggccagtgtaggttgtgtagagcctcagagtgggaaacaggatgagctgtgattctgccaccgtctcagggcatgactttgggcaagtcggcctctgtctctcaaggagattgggataagacaagcatagtattggctaccagtcattaaatatcagacttctgatatatcccatttcattttcataataaccctgcaaagtagttttttaatctctactttacaatgcaaaaaaaaaaaaaaagtcaaagctcagggagttacttgttccagatcatacactggtgaatggcagggctggtttcagactcagggtctgcctcacgtcggggcctatgatcttcccaaggaacccctatgcaagcctgcctctctgctccctcccagctgcaagcatgtgattctctggctcttggtctgaccctctaggagaaacataatcaccaggcaagaagtatgctgggatatttcctcccattcagctgggctggcccagaagctcagcaaagtgaatccgccctcagaatccttgaagtaggaaggaaatcaaagaggaaaaacaaagaaaaaaaggcagcccagaatctccatgtaggggctgcataaatacatgagtggtgagaatcttcctaatgagtcacagaatgaagactgtttgaggctggaaagcccgagaggtggtttttgaggaccagcccatccgttgagtgatgagggctgggggtgcttggtatggacaggaactgcaaggggaaggcgggcaggaggctaccaaggccacgaagcgcagacaccgtccatttctgtcacagcccacctggcccagagttacagaagaggcaatgtgagttggggttttggggaggagcccaaagtcagggagacctcatttgctaaccctggaaagagtattgaggcttatggcattgccattcaggcctctccatgcaccagaggaggtataaccggctgacccagaaggaggccctgagtcagccccagccccatttagacttggagaatgagtgtcaaaatcctggacctgacattcactaaacaccagcccttgcccaagctttcccgtcacatgttgaaaaccgtcaacctggtatcctcaaggtcactcagacaagccacagaggctcctctgcaggctgtgtcatcggagccccaccccatctcaggaaagccttaaacactccaggcctagcctggcccttctgccaacggccagcacatctgtgatatcccccagctcccaaacctgcctgcctttcctcatacttcctcctctgaacacctgacatgtgtagcatccgagtcttgttacacagttgaaacacaatggcggaagggcctctaagccttcactctatcccatgcctggatgtctcaaatgtgcctgaatgctgagccaattaacagtctcaggcatgataagggagggaagaattgtcacgagtaattcatctttatcgtgctagaggtcttttggagacttgctgtgagtccatactgcacaccctcagggtctgaagcctgcagcagccaaagcccctacccagcaacagaaccagagggatagaaacagctgccagcccatgtcaggggccaggctccataaggtggcagactctggagggtgcacaggagcagagggtctgagcaggtatgtggggagagcatgaaggaggtggtccaggagaatccccctggcaacctggacgtggccacatagagtagaccgaagaaaaacccagggaacaaggagaatgggctgcaggagccatccttgcatttcccgtctcctcctggacttcatgtggctagcatggtgtctcttgaacctgtaaagggtgtaagtcagagacagcgtggaattctgggaaccatcagcaatccagtacagctgaatagcagtcaagacactttctattagtccataaagggaacacaactcaaattcacaagtttttttgtttgtttgttttttttaaagaaatgtattggctcatgaaaccaggtaggacggggatgcagagactcaagcaacgtggcatgacaatgtggtcactcactctgttctctctctcggtgtgtgtatgtgtgtgtgtgtgtgtgtgtgtgtgtgtgtgtgtgtgtgtaagactatgtctatctgtcttgcttctctttttctgtgaatatggctccttccatccaagtgaggacaagattcatgcggcagagatgtctgcaaacagctctaggcttatgttattccaccaccccagagagtggctccagaggaaagagaagacttcctctcccactgggatgatacgaattcctggaaaggactctgattggttccaactgtatcacaggcccatgactgtgtttggcagcccccaccccagaaatgagttgggcagaaggaataattcctccatccaaaatgcatggggatttgcaatgacctgaaaatgagggatagaaggttgacagggccaacaaaatagattctaccacacacagcagcagggaagatcaagtgtgggggacgttgcagtgaaataatagacagaggtgagatcatgctggccttgaaatccaggatgaggcatttagactttatcctgcaactgacgtagtagttaagaagaaagtacttaggcagatagtgagggtacaggaatcctcagtaaggttttccttttaatgaaaagcagccccaaaatcaagttctttctcttcttcttcttcttcttttttttttttttttgagatggagtctcactctgtcaccaggctggagtgcagtggcacaatctcagctcactgcaacctccgcctcccaggttcaagcgattctcctgcctcagcctcctgagtggctgggactacaggagcatgccaccatgcccaggtaatttttgtatttttagtagagacagggtttcatcatgttggccaggatggtctcgatctcctgacctcatgatccgcccgccttggcctcccaaagtgttgggattacaggtgtgagccaccacacccaggcaatcatgttcttttctaacaaagagcagcctgtaaaattgagctgcagacatagacaagcaagctggaagcttgcacaggtgaatgctggcacttgtgtcaataggagaaggctacctgggactaggcatgatcaaaatgatggctccatgttcccttctctttgccagccacgtgtacagtaaggagcagacaagatggcgctggccaagtggaaggcccatttgcagaataagattagggtggggtgaccagccttccccaagtgctatgtaaacgtcgcatctggtcaaaccaatctgtgggccctacttaagtcagacaccgcctcctcaagcctgcatgcatataaaatctgctgcaggttttccgtttcagtcacctcttcctcatgagagggaaggctgctctcctctcaccttcctattgcctattaaactttccgttctttgacccactcacatgtgtccctgtccttaaacttcttggtgcaagatgacaaactccgagacaatgttgctgcttcacaactggtagggcaccttgggaatatttaaatgaggtaagagatggtattggatccatgtttgagaaagatcaagcaggttttttgtttatttgtgcactcattcagaaatatttcttgaataataatttgtacccaggatcatgtttggacttgggagtacaaagataaatgatgcccccacttttcaaatctactaagtccattctaatgccacagactgtttcaaatctcctgtatatttcctgccacctgctctccacctcctcagaaaccctaccagtgggggacaagcacatgcatgcagtccttgtctatcctaacagctggagaagtacttttctggttaccccttgagctcctggtccatcaaaacaccactgagcctcctcaaacctctttgatagccactaactgattttctccttttgctttccatcttgtactccaatttatagggccggtaaatagagagatgccttggtctgtgtctgaattttggtcctgccacctactaaccatgtaatcatagccaagctactgaaaaactccaagttactgaaaatagtcctccacactcagtccttccctgcagctcagtttcttcatctgtaaaagggggacattcatggaaactactctcctttcagttaatttacaggaagcactgggaacagcattctggccccgtgtaagcgtccaatcagtgtttgctatctttggcctgttccagttgtctctcagtaggagctgggggaaggtctctccttcaaccatcctagctggtgtcttccaatctgcctggcttctctgcctgtcttcaggcacagggctgggactcaatgtatacatagcagtacagctctgcctgctgttggtaaatatccgttgtcccacgaccccgaatgtctggactatcctggccctctgctcctgcccttcataatccaacaagtaaaatgttatcatctggctcattagcggctgctgacaagagggctgaattccttctgatagacaggcacacatgccacagcgactgtttagtcatctcatcatccccctgcatgagcctgctgggggccctgagttccaagaaggacccagagcaccctgttatctgatatgtttgtgggaggaaattgcctccctctcctctccttccaaacttgtgccttttcctctggtccttctcttagtgagtggctccaccatccagccaggagcctaggaatcttttatttattcaacgatattgactaagtgtctccttagtaataaaaataacaacaataaaccataaaataagtgctaggaagctctgcagagttgggatatttttatgatgactactttgatttttttttttttttttttttgagacaggatctcactctttaacccagggtagaatacagtggtgtgatcatggctcattgcagccttaattcctgggctcaagtgattctcccacctcagcctcctgagtagctaggactacaggtgtgtgccaccaggcctggctaatttttagtacatatacatatatatatatatgcatatgtactaatatatgtatgtttagtacatatatatgtttgtagagacaaggtcttgcaatgttgctcaggctggtcttgaactcctggcctcacaaaattctcctgcctcggcctttcaaagcgttgcacgtggtggtcttcccttgaggcaatgtggtgctggctcttttcttatcttccctaggactgttgctcacatctcctggcctctacagttccatctcctccagttcattctccacaccaggggagagagctttctagaaagcctgtcatacttagtgttttgatttgagtttccctttagaggaggattcattaatttctctgcaaggcgatcccaagaaacaaggtaagagagcagagaaatgagacagggatgggaaggaagattttaaagggtgcatctagttctcactgtgagtgactagatcacactgtcctcttaagggttctgggagcccgtgcagtctggcacctcagagtttccaaccaaagggacaaggatgttatggtcttcatacaccaacccctctcagtctttgaaaaacaggagggcgaggcactggatgagattccagtacttctggcctgctgcacacgacagagtgggctcagctgccacagaatgctctcaggcagacacgtggatgctggcagtgggaacttgggggtttatgggcggggcaccccagagactgcagtatcaggcccaatctagcaggaagtcacacaaggtttacttcaagataacactttgagcttacaatactttcctcaaaccttactgaaatgataaaaacaacagagaaaaaacaaaaaacaaacaaaaaaagacctgcaaccccttgttaaaaaaggaagaactatctcaacctggcagaaactttgaggactttctggaagatagaaacctgctatgattggctatcctataaccacagcagcaaaggcagggcctgtcttcgagtccctcctgaggctgatagccacaggaaagtgccagtagaggctgaaacagaaataagctgggaaaaggctggggggaagctcatagagacttgtgcagttgctgacagcacccagaagacctatcagtcctttcaatgtgggctttcatatttatgaacatcagtacagaacaacaaacaccaattaatcatttgaggagatctagcagcctccaaaagggaatcaacagttaatcagagccaatggcttctgtttcgaaagaatgattacagaaaacaggagataacttttaaagattcaaatttgtattttcatccaactccactggaaacaaggaaaagaaagcaaattggtattctcagtaaaatttcagagagtaaaagaagcatgaaatgaaatactgggagaataagaaacagtccttgaaaataaaagaacgactgtatcaccagaataaaatagaactacagcatatatgctactgaaacctgatttaatgaattgttagatcaaaagaattaatataattgctcaaaggacacagacaaaaagataaattcatgaaataaaagatgagggaaggagatagacataatgtttcaatatttatataacaggagtcacagaataaaagagaatattagatggaagagaagtaccagtgaacaaaagaagtttggtgcggtggctggagcctgtagtcccagctacttgggaggctgaggcaggaggatctcttaagcctggaagttcaagaccagcggagcaacataatgagacactatccccatcaaaatataaatataaataaataaataaataaatgaaagaaaatttcctgagctaaagaaggagcataatctgtagattgaaatgattcactgagtcctgggcagaattgttgcaaaatatccacctgtgtacatttctggtaaagtttatgcatttcagtaacgatgtaaaatcctacacacttctatatagagagcaattcagattggcattggagttcttatttgcaatattgaaaattagaagacaatggggtaaagtataaataatcccgtggattaagaattatattaaaatttcacagccaaccaaactttcatgtatgggaacaaagagagacattttcagaagtgtcaaaactcaaaattatagcatccaggtgccttttctgaaaaacagactttgtggaaggattataaccaaatggaaattaaccaggaattagtatttcacaaagcagaggatgtgatgatagaaatctaatgagaaacaaagtcaagatcacttacggttatatccaaatcaattttcccaacgtgtagtatttttaccacatatggattgagatggtttttactgtaacagttatatatttatttcaatagttgttaggaaaatataggtagatactaaatccataatttcatatttatttgtatttaatataaagtaagtatttaagttttaaaaagtgggctggttgaaaggaaagtattaggtaagtaatagtacaaatgatacattgtagtgtaggtgatagacaactgactgaattttcggaaatgttgagccgaataattgtcaataacgtggttgtaaaatacattccagactttacccaactgtgatgataaaacaggtttgtgtttcttctaaaacttaaattacagggctgatgccctaggtacaaaattagcacaaagtcatcttcttctctctcaaatattcttcaaaaattattccttcaaatattctaggcttgcttctatttgcccaggaattagttcagctcattgtttatctgtgggtacctcctgggagaagggaattccaggatgtcccctgtggctagattcacttccctggtgtcaacactccattggcagtaagtgcccagctggtgttttggggcactccgctgaagtcatggtgatcttgaagagatgttctggtggtcctgtcccccaaaccatgtcagctgccactgatacagttctctgccaatcgattccacagtgctttcttgtagttcaagaatgtttgcctcttctcacagcgctgcgcttgtttaagatgcccacagtaaaactgcctggtctcagtgttacagctcttaaatagcacagcattttctgttcatctatgcactgtagttttcttcaagacatctccccaagcaggagagaagccggcttagaagttctacaattaattctattctgtgttcacctcaaacatttcccggactgtggtgatgagtgttttggtgtcccgcaaagcagagcccgagacaaggacttagtgcaggcgatcccaggaagtaggagcaaggagatagggagagtaaaacagagaaagaggaaaagtccatcaacagacacactgtgaggtcactattgtcagcaacaagagctcagttccaccaggacctctgagaagtatgcagaatatttcccacaagtgtctacccagtggagaggaggatggagcatttgttcattggccaacattgtgcattggttgagggttgcccatagggtatgagttcctcggcacttctgagctgggccagcctggaaagcttcctggcattaggagaaggccctagcacagaatgaagaaagacaagaggtatgagtattgaggtagagcaccagcagcagaaggtgagtcagacagtctatcacaggtatgaatgaaatcagagatgggctaaatgagtgtgacacagacacaagaggcaacaactacaatcccacttagcagtccagccttcccactcctcatcatcagtttcaatcatagccccatcttccacatagttctatattgctttttggctcccgttagagcaacgacagtagatatgacatgttttaacatatttgatcctctgtcagcaagagaaaaagcaaaaatgaattaaccaaagtgtataaaacacagtaaacctgataaactttaaaaagagataaatttggttatttgaaaacaaaaaataaggaaacctctggcaagtctgagaagcagacttctggcaaaagagagaaaaacacacatataggaaactgtaatgaaaaagctagaaaccactgacacagaagatattttaaaaattaaaggagacttatacagtttactaatatgaattttaaaatatagatataatagataatgtgctatgaaaatgtaatgacaaaaaccaatgcaaaaaaaaataaagaaaatgtctgaattgcttactaaacacaaatgaaatttaaaagactatggaggccgggcacggtggctcacgcctgtaatcccagcactttgggaggccgaggtgggtggatcacgaggtccggagatcgagaccatcctggctaacacggtgaaaccccgtctctactaaaaatactaaaaaaaaataattagctggacgtggtggcgggcgcctgtagacccagctactcgggaggctgaggcaggagaatggcgtgaacctgggaggcggagcttgcagtgagcagagatagcgccattgcactccagcctgggtgacagagcgagactccgcctcaaaaaaaaaaaaaagactatggaaaatctgctcacctccccaaattttgcattcttagatagtttcatgggtgggacagaaacagttcctgaaagaaaggagaatgctacagaagaaagaaatagtaacaggaaagtgaaaataaatgatgctcattgcattccaccctttgagtaaaacagacaatgccacgtagactcttccacgtatagaattccaagaaggcaaacataatacaatgcagtcacctcgcccttaagggttgacaaccaaagcaacatccaactatcacatccagttgcaagtcaagggtcgctgggtgagatacgttccattcaatcagaccctgatgctggtcagttagtaattatgtattgaggacataagagtacagaaaaggacgtgtaactgtcctcaaatatcttatactccaacgggaggagatagatagtaaacatgcaaacaaataaatagataagatgaattcaggtact

SEQ ID NO: 724 - DNA, 6582 bp, Homo sapiens
caatgtacacactttatttgtatattaaacaagtagaaatatgtttttccccatctttctttaaacatgttcttctccccatatatcttctgtttacccatttttaacaggaacatgagcattcaacctattccattttttcttatatgcaaaggcagagtgcaactgtgataggggcaattgattcttagctttggttttggggacaatatggggtggtgggaactacggcaaactggacagtactgccttagctgaaggcagcagcccctattcaatgccaatcaattgttggcacagagaatgcaggccttatgtcgccaggttttccaaaatttcaaaaagaatccagaagtctcaattttactgtgcaattctcttttattaggattatctctgctgcatttagttgtatgtatcccttatggcccccaggcaggtccactcctgggcattcaagtcggtccatgtgtcaggcgtgcagggtgggtcacagcatctaggagctcagtgcagcttgggactttgggacatacgctccacctctctgagcctcagtctccttgtccatcatataaggaaatcactgattccagccttcctgggctgtggagaggattccctcagcggctgtgaaagagtgctttcttgcgggtcagccccgacaggacagacttaagggcgggagggagcccatcccgcttgccccaacgaacgcgggcgcggggctttcctcgcaggttacataaggcagccgcgggtggaggcagcagaggcgagcgcacgtccgtcgagggggaaaggggcgtggggaggcggccggggcggccggtatcccccgggcgtgagtgcgcagcgcgcgggggagcgcagggcgcggcggagtcgggtttcagagcgcgggtgactcggggcgcgggccgggagccgggattctgcccgccgccgccgctgccgagcgccgcctttgttccctgcaggaagggcgagcgcggcggccagcgctcagcgacccttcgtcctccgctaagctccaacgctctgctcgactagccgcgcgccttccggggctccgcagacccgcgagatggcaccaaggtaagacccgcttctctgcttcctcgcgtcccgggcccctccaatactcttgcccgcctcaccttttctccctcgggcacatcttgcaggaggaacaacgggcagtgctggtgtctgctgatgctgctctcggtctccacgcccctccctgctgtcacccagacccgcggtgcgacagagactgcttcccagggtcacctggacctcacgcagctcatcggtgtcccgctgccctcgtccgtatcctttgtcacaggctatggtggcttcccggcctacagtttcgggcctggtgccaatgttggccgcccagccaggactctcatcccatccaccttcttcagggacttcgccatcagcgtcgtggtgaagcccagcagcacccgtggtggcgtgctcttcgccatcactgacgccttccagaaggtcatctacctgggcctgcggctctcaggtgtggaggacggccaccagcggatcatcctctactacacggagccaggctcccatgtgtcccaagaggctgctgccttctcggtgcctgtgatgacccacaggtggaaccgcttcgccatgattgtccagggtgaggaagtgaccctcctcgtgaactgtgaggagcacagccgcatccccttccagcggtcctcccaggctttggcttttgagtccagcgctggaatcttcatgggcaatgcaggagctacagggctcgagagattcactggctccctccagcagctcaccgtgcaccccgaccccaggactcccgaggagctgtgtgaccctgaagagtcctcggcatctggagagaccagtgggctgcaggaggcagacggagtagctgagatcttagaagccgtcacctacactcaagcctcgcccaaagaagcaaaagttgaacccataaacacacctccaactccatcctccccctttgaagacatggaactttctggtgaacctgtacccgaggggaccctggaaaccaccaacatgagcatcatccagcacagcagccccaaacaagggtctggtgagatcctgaatgacacactggagggggttcattctgtggatggtgaccccattactgacagcggctcaggggctggggccttccttgacattgctgaagaaaagaatttagcagcaacagcagcggggctggccgaggtgcccatcagcactgctggagaagcagaggccagcagtgtgcccaccgggggaccaaccctctctatgtccacggagaacccagaggaaggggtcactccaggtccagataatgaagagcgtttagcagcaacagcagcaggggaggccgaggcactcgccagcatgcctggggaagtggaggccagtggtgtggcccccggggagctggacctctccatgtccgcccagagcctcggggaagaggccactgtgggtccaagcagtgaagacagtttaacaacagctgcagctgcaaccgaagtgtccctcagtacttttgaggatgaggaagccagtggggtccccacagatggcctggctcccctcacagccaccatggcccctgagcgggcagtcacttctggtcctggtgatgaagaagacttggcagcagccacaacagaggagcccctcatcacagctgggggtgaagagtccggcagccctccccctgatgggccaccgctgcccctgcccacagtggctcctgaaagatggatcactccagctcaaagagaacatgtgggaatgaaaggacaggctgggcccaaaggagaaaagggtgatgctggggaggagcttcctggccctcctgaaccttctgggcctgttggacccacggcaggagcagaagcagagggctctggcctaggctggggctcggacgtcggctctggctctggtgacctggtgggcagtgagcagctgctgagaggtcctccaggacccccagggccacctggcttacctgggattccaggaaaaccaggaactgatgttttcatgggaccccctggatctcctggagaggatggacctgctggtgaacctgggcccccgggccctgagggacagcctggagttgatggagccaccggccttcccgggatgaaaggggagaagggagcaagagggcctaatggctcagttggtgaaaagggtgaccctggcaacagaggcttacctggacccccggggaaaaagggacaagctggccctcctggggtcatgggacccccagggcctcctggaccccctgggcccccaggccctggatgcacaatgggacttggattcgaggataccgaaggctctggaagcacccagctattgaatgaacccaaactctccagaccaacggctgcaattggtctcaaaggagagaaaggagaccggggacccaagggagaaagggggatggatggagccagtattgtgggaccccctgggccgagagggccacctgggcacatcaaggtcttgtctaattccttgatcaatatcacccatggattcatgaatttctcggacattcctgagctggtggggcctccggggccggacgggttgcctgggctgccaggatttccaggtcctagaggaccaaaaggtgacactggtttacctggctttccaggactaaaaggagaacagggcgagaagggagagccgggtgccatcctgacagaggacattcctctggaaaggctgatggggaaaaagggtgaacctggaatgcatggagccccaggaccaatggggcccaaaggaccaccaggacataaaggagaatttggccttcccgggcgacctggtcgcccaggactgaatggcctcaagggtaccaaaggagatccaggggtcattatgcagggcccacctggcttacctggccctccaggcccccctgggccacctggagctgtgattaacatcaaaggagccattttcccaatacccgtccgaccacactgcaaaatgccagttgatactgctcatcctgggagtccagagctcatcacttttcacggtgttaaaggagagaaaggatcctggggtcttcctggctcaaagggagaaaaaggcgaccagggagcccagggaccaccaggtcctccacttgatctagcttacctgagacactttctgaacaacttgaagggggagaatggagacaaggggttcaaaggtgaaaaaggagaaaaaggagacattaatggcagcttccttatgtctgggcctccaggcctgcccggaaatccaggcccggctggccaaaaaggggagacagtcgttgggccccaaggacccccaggtgctcctggtctgcctgggccacctggctttggaagacctggtgatcctgggccaccggggcccccggggccaccaggacctccagctatcctgggagcagctgtggcccttccaggtccccctggccctccaggacagccagggcttcccggatccagaaacctggtcacagcattcagcaacatggatgacatgctgcagaaagcgcatttggttatagaaggaacattcatctacctgagggacagcactgagtttttcattcgtgttagagatggctggaaaaaattacagctgggagaactgatccccattcctgccgacagccctccaccccctgcgctttccagcaacccacatcagcttctgcctccaccaaaccctatttcaagtgccaattatgagaagcctgctctgcatttggctgctctgaacatgccattttctggggacattcgagctgattttcagtgcttcaagcaggccagagctgcaggactgttgtccacctaccgagcattcttatcttcccatttgcaagatctgtccaccattgtgaggaaagcagagagatacagccttcccatagtgaacctcaagggccaagtactttttaataattgggactcaattttttctggccacggaggtcagttcaatatgcatattccaatatactcctttgatggtcgagacataatgacagatccttcttggccccagaaagtcatttggcatggctccagcccccatggcgtccgccttgtggataactactgtgaagcatggcgaaccgcggacacagcggtcacgggacttgcctccccgctgagcacggggaagattctggaccagaaagcatacagctgtgctaatcggctaattgtcctatgtatcgaaaacagtttcatgacagacgctaggaagtaatggccttctgatgattcttaaagagttttcaattttttcttatgtgaagagttgacactgaaatctaaaatgtttaattgttgtaaatattacagtttttttttttttactacatattctttacaacagcaaccaaagaaaacatacctcaatacactcaaaactgaagacatagaggactcagatcaaagacaaaatctgatccatatattggtgctagattctgcaggaaaccccagcagtgtgaacgcatcccaacataggttaagagcaagttgaaaacaaaggccatggcattctgccactgcatccttcagacagttatatcctccttttaaaccattgttgttgagtgtaagatgtccttcatgttttcttataaagtcagtgtttagaaatgttaccctttctaagttatatacagatcaaatgcttttttctttcacgtacatccatcatttgcaactgctgttcgtacacagaaacaggactgctcaaatgatcctatttgtattttctgatgctatcagactctaatgtttttttccctaaaatattattgccatcatgctttaggaattttatatttttacacaatcatattttagtatggtgtctgtttatgtaactctgacttgctggaaaagttgaaactccaaataatctgaaactagaaaagaaatagcacataattactaccttccccttggcggctctcctccccaacccccaccccacaattttatgacttccatttggcaattgttgaattataactgcgactgaaacaaacaggttcatagagatgaattttctgagaaacatatatctacatgttgtataattggattttttttccatgtaagtgaacataaaaacatcttttccgggtgctttcttcatttgactttttcccgctagttcctttattctccatcactgatgtggaagcagacctggggtgggtttgctaatcctgccacttgtgctgcccccaggcgatgatcagagaactgaaacgttttcccatcatgctcatctgccctggctgttgtcttccacctagtggggccagtgtaggttgtgtagagcctcagagtgggaaacaggatgagctgtgattctgccaccgtctcagggcatgactttgggcaagtcggcctctgtctctcaaggagattgggataagacaagcatagtattggctaccagtcattaaatatcagacttctgatatat

SEQ ID NO: 725 - protein, 1354 aa, Homo sapiens
MLLSVSTPLPAVTQTRGATETASQGHLDLTQLIGVPLPSSVSFVTGYGGFPAYSFGPGANVGRPARTLIPSTFFRDFAISVVVKPSSTRGGVLFAITDAFQKVIYLGLRLSGVEDGHQRIILYYTEPGSHVSQEAAAFSVPVMTWNRFAMIVQGEEVTLLVNCEEHSRIPFQRSSQAFESSAGIFMGNAGATGLERFTGSLQQLTVHPDPRTPEELCDPEESSASGETSGLQEADGVAEIAVTYTQDKEAKVEPINTPPTPSSPFEDMELSGEPVPEGTLETTNMSIIQHSSPKQGSGEILNDTLEGVHSVDGDPITDSGSGAGAFLDIAEEKNLAATAAGLAEVPISTAGEAEASSVPTGGPTLSMSTENPEEGVTPGPDNEERLAATAAGEAEASMPGEVEASGVAPGELDLSMSAQSLGEEATVGPSSEDSLTTAAAATEVSLSTFEDEEASGVPTDGLAPLTATMAPERAVTSGPGDEEDLAAATTEEPLITAGGEESGSPPPDGPPLPLPTVAPERWITPAQREHVGMKGQAGPKGEKGDAGEELPGPPEPSGPVGPTAGAEAEGSGLGWGSDVGSGSGDLVGSEQLLRGPPGPPGPPGLPGIPGKPGTDVFMGPPGSPGEDGPAGEPGPPGPEGQPGVDGATGLPGMKGEKGRPNGSVGEKGDPGNRGLPGPPGKKGQAGPPGVMGPPGPPGPPGPPGPGCTMGLGFEDTEGSGSTQLLNEPKLSRPTAAIGLKGEKGDRGPKGERGMDGASIVGPPGPRGPPGHIKVLSNSLINITHGFMNFSDIPELVGPPGPDGLPGLPGFPGPRGPKGDTGLPGFPGLKGEQGEKGEPGAILTEDIPLERLMGKKGEPGMHGAPGPMGPKGPPGHKGEFGLPGRPGRPQGLKGTKGDPGVIMQGPPGLPGPPGPPGPPGAVINIKGAIFPIPVRPHCKMPVDTAHPGSPELITFHGVKGEKGSWGLPGSKGEKGDQGAQGPPGPPLDLAYLRHFLNNLKGENGDKGFKGEKGEKGDINGSFLMSGPPGLPGNPGPAGQKGETVVGPQGPPGAPGLPGPPGFGRPGDPGPPGPPGPPGPPAILGAAVPGPPGPPGQPGLPGSRNLVTAFSNMDDMLQKAHLVIEGTFIYLRDSTEFFIRVRDGWKKLQLGELIPIPADSPPPPALSSNPHQLLPPPNPISSANYEKPALHLAALNMPFSGDIRADFQCFKQARAAGLLSYAFLSSHLQDLSTIVRKAERYSLPIVNLKGQVLFNNWDSIFSGHGGQFNMHIPIYSFDGRDIMTDPSWPQKVIWHGSSPHGVRLVDNYCEAWRTADTAVTGLDLSTGKILDQKAYSCANRLIVLCIENSFMTDARK

SEQ ID NO: 726 - DNA, 6493 bp, Homo sapiens
caatgtacacactttatttgtatattaaacaagtagaaatatgtttttccccatctttctttaaacatgttcttctccccatatatcttctgtttacccatttttaacaggaacatgagcattcaacctattccattttttcttatatgcaaaggcagagtgcaactgtgataggggcaattgattcttagctttggttttggggacaatatggggtggtgggaactacggcaaactggacagtactgccttagctgaaggcagcagcccctattcaatgccaatcaattgttggcacagagaatgcaggccttatgtcgccaggttttccaaaatttcaaaaagaatccagaagtctcaattttactgtgcaattctcttttattaggattatctctgctgcatttagttgtatgtatcccttatggcccccaggcaggtccactcctgggcattcaagtcggtccatgtgtcaggcgtgcagggtgggtcacagcatctaggagctcagtgcagcttgggactttgggacatacgctccacctctctgagcctcagtctccttgtccatcatataaggaaatcactgattccagccttcctgggctgtggagaggattccctcagcggctgtgaaagagtgctttcttgcgggtcagccccgacaggacagacttaagggcgggagggagcccatcccgcttgccccaacgaacgcgggcgcggggctttcctcgcaggttacataaggcagccgcgggtggaggcagcagaggcgagcgcacgtccgtcgagggggaaaggggcgtggggaggcggccggggcggccggtatcccccgggcgtgagtgcgcagcgcgcgggggagcgcagggcgcggcggagtcgggtttcagagcgcgggtgactcggggcgcgggccgggagccgggattctgcccgccgccgccgctgccgagcgccgcctttgttccctgcaggaagggcgagcgcggcggccagcgctcagcgacccttcgtcctccgctaagctccaacgctctgctcgactagccgcgcgccttccggggctccgcagacccgcgagatggcaccaaggaggaacaacgggcagtgctggtgtctgctgatgctgctctcggtctccacgcccctccctgctgtcacccagacccgcggtgcgacagagactgcttcccagggtcacctggacctcacgcagctcatcggtgtcccgctgccctcgtccgtatcctttgtcacaggctatggtggcttcccggcctacagtttcgggcctggtgccaatgttggccgcccagccaggactctcatcccatccaccttcttcagggacttcgccatcagcgtcgtggtgaagcccagcagcacccgtggtggcgtgctcttcgccatcactgacgccttccagaaggtcatctacctgggcctgcggctctcaggtgtggaggacggccaccagcggatcatcctctactacacggagccaggctcccatgtgtcccaagaggctgctgccttctcggtgcctgtgatgacccacaggtggaaccgcttcgccatgattgtccagggtgaggaagtgaccctcctcgtgaactgtgaggagcacagccgcatccccttccagcggtcctcccaggctttggcttttgagtccagcgctggaatcttcatgggcaatgcaggagctacagggctcgagagattcactggctccctccagcagctcaccgtgcaccccgaccccaggactcccgaggagctgtgtgaccctgaagagtcctcggcatctggagagaccagtgggctgcaggaggcagacggagtagctgagatcttagaagccgtcacctacactcaagcctcgcccaaagaagcaaaagttgaacccataaacacacctccaactccatcctccccctttgaagacatggaactttctggtgaacctgtacccgaggggaccctggaaaccaccaacatgagcatcatccagcacagcagccccaaacaagggtctggtgagatcctgaatgacacactggagggggttcattctgtggatggtgaccccattactgacagcggctcaggggctggggccttccttgacattgctgaagaaaagaatttagcagcaacagcagcggggctggccgaggtgcccatcagcactgctggagaagcagaggccagcagtgtgcccaccgggggaccaaccctctctatgtccacggagaacccagaggaaggggtcactccaggtccagataatgaagagcgtttagcagcaacagcagcaggggaggccgaggcactcgccagcatgcctggggaagtggaggccagtggtgtggcccccggggagctggacctctccatgtccgcccagagcctcggggaagaggccactgtgggtccaagcagtgaagacagtttaacaacagctgcagctgcaaccgaagtgtccctcagtacttttgaggatgaggaagccagtggggtccccacagatggcctggctcccctcacagccaccatggcccctgagcgggcagtcacttctggtcctggtgatgaagaagacttggcagcagccacaacagaggagcccctcatcacagctgggggtgaagagtccggcagccctccccctgatgggccaccgctgcccctgcccacagtggctcctgaaagatggatcactccagctcaaagagaacatgtgggaatgaaaggacaggctgggcccaaaggagaaaagggtgatgctggggaggagcttcctggccctcctgaaccttctgggcctgttggacccacggcaggagcagaagcagagggctctggcctaggctggggctcggacgtcggctctggctctggtgacctggtgggcagtgagcagctgctgagaggtcctccaggacccccagggccacctggcttacctgggattccaggaaaaccaggaactgatgttttcatgggaccccctggatctcctggagaggatggacctgctggtgaacctgggcccccgggccctgagggacagcctggagttgatggagccaccggccttcccgggatgaaaggggagaagggagcaagagggcctaatggctcagttggtgaaaagggtgaccctggcaacagaggcttacctggacccccggggaaaaagggacaagctggccctcctggggtcatgggacccccagggcctcctggaccccctgggcccccaggccctggatgcacaatgggacttggattcgaggataccgaaggctctggaagcacccagctattgaatgaacccaaactctccagaccaacggctgcaattggtctcaaaggagagaaaggagaccggggacccaagggagaaagggggatggatggagccagtattgtgggaccccctgggccgagagggccacctgggcacatcaaggtcttgtctaattccttgatcaatatcacccatggattcatgaatttctcggacattcctgagctggtggggcctccggggccggacgggttgcctgggctgccaggatttccaggtcctagaggaccaaaaggtgacactggtttacctggctttccaggactaaaaggagaacagggcgagaagggagagccgggtgccatcctgacagaggacattcctctggaaaggctgatggggaaaaagggtgaacctggaatgcatggagccccaggaccaatggggcccaaaggaccaccaggacataaaggagaatttggccttcccgggcgacctggtcgcccaggactgaatggcctcaagggtaccaaaggagatccaggggtcattatgcagggcccacctggcttacctggccctccaggcccccctgggccacctggagctgtgattaacatcaaaggagccattttcccaatacccgtccgaccacactgcaaaatgccagttgatactgctcatcctgggagtccagagctcatcacttttcacggtgttaaaggagagaaaggatcctggggtcttcctggctcaaagggagaaaaaggcgaccagggagcccagggaccaccaggtcctccacttgatctagcttacctgagacactttctgaacaacttgaagggggagaatggagacaaggggttcaaaggtgaaaaaggagaaaaaggagacattaatggcagcttccttatgtctgggcctccaggcctgcccggaaatccaggcccggctggccaaaaaggggagacagtcgttgggccccaaggacccccaggtgctcctggtctgcctgggccacctggctttggaagacctggtgatcctgggccaccggggcccccggggccaccaggacctccagctatcctgggagcagctgtggcccttccaggtccccctggccctccaggacagccagggcttcccggatccagaaacctggtcacagcattcagcaacatggatgacatgctgcagaaagcgcatttggttatagaaggaacattcatctacctgagggacagcactgagtttttcattcgtgttagagatggctggaaaaaattacagctgggagaactgatccccattcctgccgacagccctccaccccctgcgctttccagcaacccacatcagcttctgcctccaccaaaccctatttcaagtgccaattatgagaagcctgctctgcatttggctgctctgaacatgccattttctggggacattcgagctgattttcagtgcttcaagcaggccagagctgcaggactgttgtccacctaccgagcattcttatcttcccatttgcaagatctgtccaccattgtgaggaaagcagagagatacagccttcccatagtgaacctcaagggccaagtactttttaataattgggactcaattttttctggccacggaggtcagttcaatatgcatattccaatatactcctttgatggtcgagacataatgacagatccttcttggccccagaaagtcatttggcatggctccagcccccatggcgtccgccttgtggataactactgtgaagcatggcgaaccgcggacacagcggtcacgggacttgcctccccgctgagcacggggaagattctggaccagaaagcatacagctgtgctaatcggctaattgtcctatgtatcgaaaacagtttcatgacagacgctaggaagtaatggccttctgatgattcttaaagagttttcaattttttcttatgtgaagagttgacactgaaatctaaaatgtttaattgttgtaaatattacagtttttttttttttactacatattctttacaacagcaaccaaagaaaacatacctcaatacactcaaaactgaagacatagaggactcagatcaaagacaaaatctgatccatatattggtgctagattctgcaggaaaccccagcagtgtgaacgcatcccaacataggttaagagcaagttgaaaacaaaggccatggcattctgccactgcatccttcagacagttatatcctccttttaaaccattgttgttgagtgtaagatgtccttcatgttttcttataaagtcagtgtttagaaatgttaccctttctaagttatatacagatcaaatgcttttttctttcacgtacatccatcatttgcaactgctgttcgtacacagaaacaggactgctcaaatgatcctatttgtattttctgatgctatcagactctaatgtttttttccctaaaatattattgccatcatgctttaggaattttatatttttacacaatcatattttagtatggtgtctgtttatgtaactctgacttgctggaaaagttgaaactccaaataatctgaaactagaaaagaaatagcacataattactaccttccccttggcggctctcctccccaacccccaccccacaattttatgacttccatttggcaattgttgaattataactgcgactgaaacaaacaggttcatagagatgaattttctgagaaacatatatctacatgttgtataattggattttttttccatgtaagtgaacataaaaacatcttttccgggtgctttcttcatttgactttttcccgctagttcctttattctccatcactgatgtggaagcagacctggggtgggtttgctaatcctgccacttgtgctgcccccaggcgatgatcagagaactgaaacgttttcccatcatgctcatctgccctggctgttgtcttccacctagtggggccagtgtaggttgtgtagagcctcagagtgggaaacaggatgagctgtgattctgccaccgtctcagggcatgactttgggcaagtcggcctctgtctctcaaggagattgggataagacaagcatagtattggctaccagtcattaaatatcagacttctgatatat

SEQ ID NO: 727 - protein, 1368 aa, Homo sapiens
MAPRRNNGQCWCLLMLLSVSTPLPAVTQTRGATETASQGHLDLTQLIGVPLPSSVSFVTGYGGFPAYSFGPGANVGRPARTLIPSTFFRDFAISVVVKPSSTRGGVLFAITDAFQKVIYLGLRLSGVEDGHQRIILYYTEPGSHVSQEAAAFSVPVMTWNRFAMIVQGEEVTLLVNCEEHSRIPFQRSSQAFESSAGIFMGNAGATGLERFTGSLQQLTVHPDPRTPEELCDPEESSASGETSGLQEADGVAEIAVTYTQDKEAKVEPINTPPTPSSPFEDMELSGEPVPEGTLETTNMSIIQHSSPKQGSGEILNDTLEGVHSVDGDPITDSGSGAGAFLDIAEEKNLAATAAGLAEVPISTAGEAEASSVPTGGPTLSMSTENPEEGVTPGPDNEERLAATAAGEAEASMPGEVEASGVAPGELDLSMSAQSLGEEATVGPSSEDSLTTAAAATEVSLSTFEDEEASGVPTDGLAPLTATMAPERAVTSGPGDEEDLAAATTEEPLITAGGEESGSPPPDGPPLPLPTVAPERWITPAQREHVGMKGQAGPKGEKGDAGEELPGPPEPSGPVGPTAGAEAEGSGLGWGSDVGSGSGDLVGSEQLLRGPPGPPGPPGLPGIPGKPGTDVFMGPPGSPGEDGPAGEPGPPGPEGQPGVDGATGLPGMKGEKGRPNGSVGEKGDPGNRGLPGPPGKKGQAGPPGVMGPPGPPGPPGPPGPGCTMGLGFEDTEGSGSTQLLNEPKLSRPTAAIGLKGEKGDRGPKGERGMDGASIVGPPGPRGPPGHIKVLSNSLINITHGFMNFSDIPELVGPPGPDGLPGLPGFPGPRGPKGDTGLPGFPGLKGEQGEKGEPGAILTEDIPLERLMGKKGEPGMHGAPGPMGPKGPPGHKGEFGLPGRPGRPQGLKGTKGDPGVIMQGPPGLPGPPGPPGPPGAVINIKGAIFPIPVRPHCKMPVDTAHPGSPELITFHGVKGEKGSWGLPGSKGEKGDQGAQGPPGPPLDLAYLRHFLNNLKGENGDKGFKGEKGEKGDINGSFLMSGPPGLPGNPGPAGQKGETVVGPQGPPGAPGLPGPPGFGRPGDPGPPGPPGPPGPPAILGAAVPGPPGPPGQPGLPGSRNLVTAFSNMDDMLQKAHLVIEGTFIYLRDSTEFFIRVRDGWKKLQLGELIPIPADSPPPPALSSNPHQLLPPPNPISSANYEKPALHLAALNMPFSGDIRADFQCFKQARAAGLLSYAFLSSHLQDLSTIVRKAERYSLPIVNLKGQVLFNNWDSIFSGHGGQFNMHIPIYSFDGRDIMTDPSWPQKVIWHGSSPHGVRLVDNYCEAWRTADTAVTGLDLSTGKILDQKAYSCANRLIVLCIENSFMTDARK

SEQ ID NO: 728 - DNA, 6115 bp, Homo sapiens
cttttattaggattatctctgctgcatttagttgtatgtatcccttatggcccccaggcaggtccactcctgggcattcaagtcggtccatgtgtcaggcgtgcagggtgggtcacagcatctaggagctcagtgcagcttgggactttgggacatacgctccacctctctgagcctcagtctccttgtccatcatataaggaaatcactgattccagccttcctgggctgtggagaggattccctcagcggctgtgaaagagtgctttcttgcgggtcagccccgacaggacagacttaagggcgggagggagcccatcccgcttgccccaacgaacgcgggcgcggggctttcctcgcaggttacataaggcagccgcgggtggaggcagcagaggcgagcgcacgtccgtcgagggggaaaggggcgtggggaggcggccggggcggccggtatcccccgggcgtgagtgcgcagcgcgcgggggagcgcagggcgcggcggagtcgggtttcagagcgcgggtgactcggggcgcgggccgggagccgggattctgcccgccgccgccgctgccgagcgccgcctttgttccctgcaggaagggcgagcgcggcggccagcgctcagcgacccttcgtcctccgctaagctccaacgctctgctcgactagccgcgcgccttccggggctccgcagacccgcgagatggcaccaaggaggaacaacgggcagtgctggtgtctgctgatgctgctctcggtctccacgcccctccctgctgtcacccagacccgcggtgcgacagagactgcttcccagggtcacctggacctcacgcagctcatcggtgtcccgctgccctcgtccgtatcctttgtcacaggctatggtggcttcccggcctacagtttcgggcctggtgccaatgttggccgcccagccaggactctcatcccatccaccttcttcagggacttcgccatcagcgtcgtggtgaagcccagcagcacccgtggtggcgtgctcttcgccatcactgacgccttccagaaggtcatctacctgggcctgcggctctcaggtgtggaggacggccaccagcggatcatcctctactacacggagccaggctcccatgtgtcccaagaggctgctgccttctcggtgcctgtgatgacccacaggtggaaccgcttcgccatgattgtccagggtgaggaagtgaccctcctcgtgaactgtgaggagcacagccgcatccccttccagcggtcctcccaggctttggcttttgagtccagcgctggaatcttcatgggcaatgcaggagctacagggctcgagagattcactggctccctccagcagctcaccgtgcaccccgaccccaggactcccgaggagctgtgtgaccctgaagagtcctcggcatctggagagaccagtgggctgcaggaggcagacggagtagctgagatcttagaagccgtcacctacactcaagcctcgcccaaagaagcaaaagttgaacccataaacacacctccaactccatcctccccctttgaagacatggaactttctggtgaacctgtacccgaggggaccctggaaaccaccaacatgagcatcatccagcacagcagccccaaacaagggtctggtgagatcctgaatgacacactggagggggttcattctgtggatggtgaccccattactgacagcggctcaggggctggggccttccttgacattgctgaagaaaagaatttagcagcaacagcagcggggctggccgaggtgcccatcagcactgctggagaagcagaggccagcagtgtgcccaccgggggaccaaccctctctatgtccacggagaacccagaggaaggggtcactccaggtccagataatgaagagcgtttagcagcaacagcagcaggggaggccgaggcactcgccagcatgcctggggaagtggaggccagtggtgtggcccccggggagctggacctctccatgtccgcccagagcctcggggaagaggccactgtgggtccaagcagtgaagacagtttaacaacagctgcagctgcaaccgaagtgtccctcagtacttttgaggatgaggaagccagtggggtccccacagatggcctggctcccctcacagccaccatggcccctgagcgggcagtcacttctggtcctggtgatgaagaagacttggcagcagccacaacagaggagcccctcatcacagctgggggtgaagagtccggcagccctccccctgatgggccaccgctgcccctgcccacagtggctcctgaaagatggatcactccagctcaaagagaacatgtgggaatgaaaggacaggctgggcccaaaggagaaaagggtgatgctggggaggagcttcctggccctcctgaaccttctgggcctgttggacccacggcaggagcagaagcagagggctctggcctaggctggggctcggacgtcggctctggctctggtgacctggtgggcagtgagcagctgctgagaggtcctccaggacccccagggccacctggcttacctgggattccaggaaaaccaggaactgatgttttcatgggaccccctggatctcctggagaggatggacctgctggtgaacctgggcccccgggccctgagggacagcctggagttgatggagccaccggccttcccgggatgaaaggggagaagggagcaagagggcctaatggctcagttggtgaaaagggtgaccctggcaacagaggcttacctggacccccggggaaaaagggacaagctggccctcctggggtcatgggacccccagggcctcctggaccccctgggcccccaggccctggatgcacaatgggacttggattcgaggataccgaaggctctggaagcacccagctattgaatgaacccaaactctccagaccaacggctgcaattggtctcaaaggagagaaaggagaccggggacccaagggagaaagggggatggatggagccagtattgtgggaccccctgggccgagagggccacctgggcacatcaaggtcttgtctaattccttgatcaatatcacccatggattcatgaatttctcggacattcctgagctggtggggcctccggggccggacgggttgcctgggctgccaggatttccaggtcctagaggaccaaaaggtgacactggtttacctggctttccaggactaaaaggagaacagggcgagaagggagagccgggtgccatcctgacagaggacattcctctggaaaggctgatggggaaaaagggtgaacctggaatgcatggagccccaggaccaatggggcccaaaggaccaccaggacataaaggagaatttggccttcccgggcgacctggtcgcccaggactgaatggcctcaagggtaccaaaggagatccaggggtcattatgcagggcccacctggcttacctggccctccaggcccccctgggccacctggagctgtgattaacatcaaaggagccattttcccaatacccgtccgaccacactgcaaaatgccagttgatactgctcatcctgggagtccagagctcatcacttttcacggtgttaaaggagagaaaggatcctggggtcttcctggctcaaagggagaaaaaggcgaccagggagcccagggaccaccaggtcctccacttgatctagcttacctgagacactttctgaacaacttgaagggggagaatggagacaaggggttcaaaggtgaaaaaggagaaaaaggagacattaatggcagcttccttatgtctgggcctccaggcctgcccggaaatccaggcccggctggccaaaaaggggagacagtcgttgggccccaaggacccccaggtgctcctggtctgcctgggccacctggctttggaagacctggtgatcctgggccaccggggcccccggggccaccaggacctccagctatcctgggagcagctgtggcccttccaggtccccctggccctccaggacagccagggcttcccggatccagaaacctggtcacagcattcagcaacatggatgacatgctgcagaaagcgcatttggttatagaaggaacattcatctacctgagggacagcactgagtttttcattcgtgttagagatggctggaaaaaattacagctgggagaactgatccccattcctgccgacagccctccaccccctgcgctttccagcaacccacatcagcttctgcctccaccaaaccctatttcaagtgccaattatgagaagcctgctctgcatttggctgctctgaacatgccattttctggggacattcgagctgattttcagtgcttcaagcaggccagagctgcaggactgttgtccacctaccgagcattcttatcttcccatttgcaagatctgtccaccattgtgaggaaagcagagagatacagccttcccatagtgaacctcaagggccaagtactttttaataattgggactcaattttttctggccacggaggtcagttcaatatgcatattccaatatactcctttgatggtcgagacataatgacagatccttcttggccccagaaagtcatttggcatggctccagcccccatggcgtccgccttgtggataactactgtgaagcatggcgaaccgcggacacagcggtcacgggacttgcctccccgctgagcacggggaagattctggaccagaaagcatacagctgtgctaatcggctaattgtcctatgtatcgaaaacagtttcatgacagacgctaggaagtaatggccttctgatgattcttaaagagttttcaattttttcttatgtgaagagttgacactgaaatctaaaatgtttaattgttgtaaatattacagtttttttttttttactacatattctttacaacagcaaccaaagaaaacatacctcaatacactcaaaactgaagacatagaggactcagatcaaagacaaaatctgatccatatattggtgctagattctgcaggaaaccccagcagtgtgaacgcatcccaacataggttaagagcaagttgaaaacaaaggccatggcattctgccactgcatccttcagacagttatatcctccttttaaaccattgttgttgagtgtaagatgtccttcatgttttcttataaagtcagtgtttagaaatgttaccctttctaagttatatacagatcaaatgcttttttctttcacgtacatccatcatttgcaactgctgttcgtacacagaaacaggactgctcaaatgatcctatttgtattttctgatgctatcagactctaatgtttttttccctaaaatattattgccatcatgctttaggaattttatatttttacacaatcatattttagtatggtgtctgtttatgtaactctgacttgctggaaaagttgaaactccaaataatctgaaactagaaaagaaatagcacataattactaccttccccttggcggctctcctccccaacccccaccccacaattttatgacttccatttggcaattgttgaattataactgcgactgaaacaaacaggttcatagagatgaattttctgagaaacatatatctacatgttgtataattggattttttttccatgtaagtgaacataaaaacatcttttccgggtgctttcttcatttgactttttcccgctagttcctttattctccatcactgatgtggaagcagacctggggtgggtttgctaatcctgccacttgtgctgcccccaggcgatgatcagagaactgaaacgttttcccatcatgctcatctgccctggctgttgtcttccacctagtggggccagtgtaggttgtgtagagcctcagagtgggaaacaggatgagctgtgattctgccaccgtctcagggcatgactttgggcaagtcggcctctgtctctcaaggagattgggataagacaagcatagtattggctaccagtcattaaatatcagacttctgatatat

SEQ ID NO: 729 - protein, 1368 aa, Homo sapiens; identical to SEQ ID NO: 727

SEQ ID NO: 730 - DNA, 6586 bp, Homo sapiens
caatgtacacactttatttgtatattaaacaagtagaaatatgtttttccccatctttctttaaacatgttcttctccccatatatcttctgtttacccatttttaacaggaacatgagcattcaacctattccattttttcttatatgcaaaggcagagtgcaactgtgataggggcaattgattcttagctttggttttggggacaatatggggtggtgggaactacggcaaactggacagtactgccttagctgaaggcagcagcccctattcaatgccaatcaattgttggcacagagaatgcaggccttatgtcgccaggttttccaaaatttcaaaaagaatccagaagtctcaattttactgtgcaattctcttttattaggattatctctgctgcatttagttgtatgtatcccttatggcccccaggcaggtccactcctgggcattcaagtcggtccatgtgtcaggcgtgcagggtgggtcacagcatctaggagctcagtgcagcttgggactttgggacatacgctccacctctctgagcctcagtctccttgtccatcatataaggaaatcactgattccagccttcctgggctgtggagaggattccctcagcggctgtgaaagagtgctttcttgcgggtcagccccgacaggacagacttaagggcgggagggagcccatcccgcttgccccaacgaacgcgggcgcggggctttcctcgcaggttacataaggcagccgcgggtggaggcagcagaggcgagcgcacgtccgtcgagggggaaaggggcgtggggaggcggccggggcggccggtatcccccgggcgtgagtgcgcagcgcgcgggggagcgcagggcgcggcggagtcgggtttcagagcgcgggtgactcggggcgcgggccgggagccgggattctgcccgccgccgccgctgccgagcgccgcctttgttccctgcaggaagggcgagcgcggcggccagcgctcagcgacccttcgtcctccgctaagctccaacgctctgctcgactagccgcgcgccttccggggctccgcagacccgcgagatggcaccaaggtaagacccgcttctctgcttcctcgcgtcccgggcccctccaatactcttgcccgcctcaccttttctccctcgggcacatcttgcaggaggaacaacgggcagtgctggtgtctgctgatgctgctctcggtctccacgcccctccctgctgtcacccagacccgcggtgcgacagagactgcttcccagggtcacctggacctcacgcagctcatcggtgtcccgctgccctcgtccgtatcctttgtcacaggctatggtggcttcccggcctacagtttcgggcctggtgccaatgttggccgcccagccaggactctcatcccatccaccttcttcagggacttcgccatcagcgtcgtggtgaagcccagcagcacccgtggtggcgtgctcttcgccatcactgacgccttccagaaggtcatctacctgggcctgcggctctcaggtgtggaggacggccaccagcggatcatcctctactacacggagccaggctcccatgtgtcccaagaggctgctgccttctcggtgcctgtgatgacccacaggtggaaccgcttcgccatgattgtccagggtgaggaagtgaccctcctcgtgaactgtgaggagcacagccgcatccccttccagcggtcctcccaggctttggcttttgagtccagcgctggaatcttcatgggcaatgcaggagctacagggctcgagagattcactggctccctccagcagctcaccgtgcaccccgaccccaggactcccgaggagctgtgtgaccctgaagagtcctcggcatctggagagaccagtgggctgcaggaggcagacggagtagctgagatcttagaagccgtcacctacactcaagcctcgcccaaagaagcaaaagttgaacccataaacacacctccaactccatcctccccctttgaagacatggaactttctggtgaacctgtacccgaggggaccctggaaaccaccaacatgagcatcatccagcacagcagccccaaacaaggcaaggtctggtgagatcctgaatgacacactggagggggttcattctgtggatggtgaccccattactgacagcggctcaggggctggggccttccttgacattgctgaagaaaagaatttagcagcaacagcagcggggctggccgaggtgcccatcagcactgctggagaagcagaggccagcagtgtgcccaccgggggaccaaccctctctatgtccacggagaacccagaggaaggggtcactccaggtccagataatgaagagcgtttagcagcaacagcagcaggggaggccgaggcactcgccagcatgcctggggaagtggaggccagtggtgtggcccccggggagctggacctctccatgtccgcccagagcctcggggaagaggccactgtgggtccaagcagtgaagacagtttaacaacagctgcagctgcaaccgaagtgtccctcagtacttttgaggatgaggaagccagtggggtccccacagatggcctggctcccctcacagccaccatggcccctgagcgggcagtcacttctggtcctggtgatgaagaagacttggcagcagccacaacagaggagcccctcatcacagctgggggtgaagagtccggcagccctccccctgatgggccaccgctgcccctgcccacagtggctcctgaaagatggatcactccagctcaaagagaacatgtgggaatgaaaggacaggctgggcccaaaggagaaaagggtgatgctggggaggagcttcctggccctcctgaaccttctgggcctgttggacccacggcaggagcagaagcagagggctctggcctaggctggggctcggacgtcggctctggctctggtgacctggtgggcagtgagcagctgctgagaggtcctccaggacccccagggccacctggcttacctgggattccaggaaaaccaggaactgatgttttcatgggaccccctggatctcctggagaggatggacctgctggtgaacctgggcccccgggccctgagggacagcctggagttgatggagccaccggccttcccgggatgaaaggggagaagggagcaagagggcctaatggctcagttggtgaaaagggtgaccctggcaacagaggcttacctggacccccggggaaaaagggacaagctggccctcctggggtcatgggacccccagggcctcctggaccccctgggcccccaggccctggatgcacaatgggacttggattcgaggataccgaaggctctggaagcacccagctattgaatgaacccaaactctccagaccaacggctgcaattggtctcaaaggagagaaaggagaccggggacccaagggagaaagggggatggatggagccagtattgtgggaccccctgggccgagagggccacctgggcacatcaaggtcttgtctaattccttgatcaatatcacccatggattcatgaatttctcggacattcctgagctggtggggcctccggggccggacgggttgcctgggctgccaggatttccaggtcctagaggaccaaaaggtgacactggtttacctggctttccaggactaaaaggagaacagggcgagaagggagagccgggtgccatcctgacagaggacattcctctggaaaggctgatggggaaaaagggtgaacctggaatgcatggagccccaggaccaatggggcccaaaggaccaccaggacataaaggagaatttggccttcccgggcgacctggtcgcccaggactgaatggcctcaagggtaccaaaggagatccaggggtcattatgcagggcccacctggcttacctggccctccaggcccccctgggccacctggagctgtgattaacatcaaaggagccattttcccaatacccgtccgaccacactgcaaaatgccagttgatactgctcatcctgggagtccagagctcatcacttttcacggtgttaaaggagagaaaggatcctggggtcttcctggctcaaagggagaaaaaggcgaccagggagcccagggaccaccaggtcctccacttgatctagcttacctgagacactttctgaacaacttgaagggggagaatggagacaaggggttcaaaggtgaaaaaggagaaaaaggagacattaatggcagcttccttatgtctgggcctccaggcctgcccggaaatccaggcccggctggccaaaaaggggagacagtcgttgggccccaaggacccccaggtgctcctggtctgcctgggccacctggctttggaagacctggtgatcctgggccaccggggcccccggggccaccaggacctccagctatcctgggagcagctgtggcccttccaggtccccctggccctccaggacagccagggcttcccggatccagaaacctggtcagtattatcatcagggtggacggggtctcactctgtcacccaaactggagtacagtggtcacagcattcagcaacatggatgacatgctgcagaaagcgcatttggttatagaaggaacattcatctacctgagggacagcactgagtttttcattcgtgttagagatggctggaaaaaattacagccacatcagcttctgcctccaccaaaccctatttcaagtgccaattatgagaagcctgctctgcatttggctgctctgaacatgccattttctggggacattcgagctgattttcagtgcttcaagcaggccagagctgcaggactgttgtccacctaccgagcattcttatcttcccatttgcaagatctgtccaccattgtgaggaaagcagagagatacagccttcccatagtgaacctcaagggccaagtactttttaataattgggactcaattttttctggccacggaggtcagttcaatatgcatattccaatatactcctttgatggtcgagacataatgacagatccttcttggccccagaaagtcatttggcatggctccagcccccatggcgtccgccttgtggataactactgtgaagcatggcgaaccgcggacacagcggtcacgggacttgcctccccgctgagcacggggaagattctggaccagaaagcatacagctgtgctaatcggctaattgtcctatgtatcgaaaacagtttcatgacagacgctaggaagtaatggccttctgatgattcttaaagagttttcaattttttcttatgtgaagagttgacactgaaatctaaaatgtttaattgttgtaaatattacagtttttttttttttactacatattctttacaacagcaaccaaagaaaacatacctcaatacactcaaaactgaagacatagaggactcagatcaaagacaaaatctgatccatatattggtgctagattctgcaggaaaccccagcagtgtgaacgcatcccaacataggttaagagcaagttgaaaacaaaggccatggcattctgccactgcatccttcagacagttatatcctccttttaaaccattgttgttgagtgtaagatgtccttcatgttttcttataaagtcagtgtttagaaatgttaccctttctaagttatatacagatcaaatgcttttttctttcacgtacatccatcatttgcaactgctgttcgtacacagaaacaggactgctcaaatgatcctatttgtattttctgatgctatcagactctaatgtttttttccctaaaatattattgccatcatgctttaggaattttatatttttacacaatcatattttagtatggtgtctgtttatgtaactctgacttgctggaaaagttgaaactccaaataatctgaaactagaaaagaaatagcacataattactaccttccccttggcggctctcctccccaacccccaccccacaattttatgacttccatttggcaattgttgaattataactgcgactgaaacaaacaggttcatagagatgaattttctgagaaacatatatctacatgttgtataattggattttttttccatgtaagtgaacataaaaacatcttttccgggtgctttcttcatttgactttttcccgctagttcctttattctccatcactgatgtggaagcagacctggggtgggtttgctaatcctgccacttgtgctgcccccaggcgatgatcagagaactgaaacgttttcccatcatgctcatctgccctggctgttgtcttccacctagtggggccagtgtaggttgtgtagagcctcagagtgggaaacaggatgagctgtgattctgccaccgtctcagggcatgactttgggcaagtcggcctctgtctctcaaggagattgggataagacaagcatagtattggctaccagtcattaaatatcagacttctgatatat

SEQ ID NO: 731 - protein, 988 aa, Homo sapiens
MSTENPEEGVTPGPDNEERLAATAAGEAEASMPGEVEASGVAPGELDLSMSAQSLGEEATVGPSSEDSLTTAAAATEVSLSTFEDEEASGVPTDGLAPLTATMAPERAVTSGPGDEEDLAAATTEEPLITAGGEESGSPPPDGPPLPLPTVAPERWITPAQREHVGMKGQAGPKGEKGDAGEELPGPPEPSGPVGPTAGAEAEGSGLGWGSDVGSGSGDLVGSEQLLRGPPGPPGPPGLPGIPGKPGTDVFMGPPGSPGEDGPAGEPGPPGPEGQPGVDGATGLPGMKGEKGRPNGSVGEKGDPGNRGLPGPPGKKGQAGPPGVMGPPGPPGPPGPPGPGCTMGLGFEDTEGSGSTQLLNEPKLSRPTAAIGLKGEKGDRGPKGERGMDGASIVGPPGPRGPPGHIKVLSNSLINITHGFMNFSDIPELVGPPGPDGLPGLPGFPGPRGPKGDTGLPGFPGLKGEQGEKGEPGAILTEDIPLERLMGKKGEPGMHGAPGPMGPKGPPGHKGEFGLPGRPGRPQGLKGTKGDPGVIMQGPPGLPGPPGPPGPPGAVINIKGAIFPIPVRPHCKMPVDTAHPGSPELITFHGVKGEKGSWGLPGSKGEKGDQGAQGPPGPPLDLAYLRHFLNNLKGENGDKGFKGEKGEKGDINGSFLMSGPPGLPGNPGPAGQKGETVVGPQGPPGAPGLPGPPGFGRPGDPGPPGPPGPPGPPAILGAAVPGPPGPPGQPGLPGSRNLVSIIIRVDGVSLCHPNWSTVVTAFSNMDDMLQKAHLVIEGTFIYLRDSTEFFIRVRDGWKKLQPHQLLPPPNPISSANYEKPALHLAALNMPFSGDIRADFQCFKQARAAGLLSYAFLSSHLQDLSTIVRKAERYSLPIVNLKGQVLFNNWDSIFSGHGGQFNMHIPIYSFDGRDIMTDPSWPQKVIWHGSSPHGVRLVDNYCEAWRTADTAVTGLDLSTGKILDQKAYSCANRLIVLCIENSFMTDARK

SEQ ID NO: 732 - DNA, 6369 bp, Homo sapiens
caatgtacacactttatttgtatattaaacaagtagaaatatgtttttccccatctttctttaaacatgttcttctccccatatatcttctgtttacccatttttaacaggaacatgagcattcaacctattccattttttcttatatgcaaaggcagagtgcaactgtgataggggcaattgattcttagctttggttttggggacaatatggggtggtgggaactacggcaaactggacagtactgccttagctgaaggcagcagcccctattcaatgccaatcaattgttggcacagagaatgcaggccttatgtcgccaggttttccaaaatttcaaaaagaatccagaagtctcaattttactgtgcaattctcttttattaggattatctctgctgcatttagttgtatgtatcccttatggcccccaggcaggtccactcctgggcattcaagtcggtccatgtgtcaggcgtgcagggtgggtcacagcatctaggagctcagtgcagcttgggactttgggacatacgctccacctctctgagcctcagtctccttgtccatcatataaggaaatcactgattccagccttcctgggctgtggagaggattccctcagcggctgtgaaagagtgctttcttgcgggtcagccccgacaggacagacttaagggcgggagggagcccatcccgcttgccccaacgaacgcgggcgcggggctttcctcgcaggttacataaggcagccgcgggtggaggcagcagaggcgagcgcacgtccgtcgagggggaaaggggcgtggggaggcggccggggcggccggtatcccccgggcgtgagtgcgcagcgcgcgggggagcgcagggcgcggcggagtcgggtttcagagcgcgggtgactcggggcgcgggccgggagccgggattctgcccgccgccgccgctgccgagcgccgcctttgttccctgcaggaagggcgagcgcggcggccagcgctcagcgacccttcgtcctccgctaagctccaacgctctgctcgactagccgcgcgccttccggggctccgcagacccgcgagatggcaccaaggaggaacaacgggcagtgctggtgtctgctgatgctgctctcggtctccacgcccctccctgctgtcacccagacccgcggtgcgacagagactgcttcccagggtcacctggacctcacgcagctcatcggtgtcccgctgccctcgtccgtatcctttgtcacaggctatggtggcttcccggcctacagtttcgggcctggtgccaatgttggccgcccagccaggactctcatcccatccaccttcttcagggacttcgccatcagcgtcgtggtgaagcccagcagcacccgtggtggcgtgctcttcgccatcactgacgccttccagaaggtcatctacctgggcctgcggctctcaggtgtggaggacggccaccagcggatcatcctctactacacggagccaggctcccatgtgtcccaagaggctgctgccttctcggtgcctgtgatgacccacaggtggaaccgcttcgccatgattgtccagggtgaggaagtgaccctcctcgtgaactgtgaggagcacagccgcatccccttccagcggtcctcccaggctttggcttttgagtccagcgctggaatcttcatgggcaatgcaggagctacagggctcgagagattcactggctccctccagcagctcaccgtgcaccccgaccccaggactcccgaggagctgtgtgaccctgaagagtcctcggcatctggagagaccagtgggctgcaggaggcagacggagtagctgagatcttagaagccgtcacctacactcaagcctcgcccaaagaagcaaaagttgaacccataaacacacctccaactccatcctccccctttgaagacatggaactttctggtgaacctgtacccgaggggaccctggaaaccaccaacatgagcatcatccagcacagcagccccaaacaagggtctggtgagatcctgaatgacacactggagggggttcattctgtggatggtgaccccattactgacagcggctcaggggctggggccttccttgacattgctgaagaaaagaatttagcagcaacagcagcggggctggccgaggtgcccatcagcactgctggagaagcagaggccagcagtgtgcccaccgggggaccaaccctctctatgtccacggagaacccagaggaaggggtcactccaggtccagataatgaagagcgtttagcagcaacagcagcaggggaggccgaggcactcgccagcatgcctggggaagtggaggccagtggtgtggcccccggggagctggacctctccatgtccgcccagagcctcggggaagaggccactgtgggtcctggtgatgaagaagacttggcagcagccacaacagaggagcccctcatcacagctgggggtgaagagtccggcagccctccccctgatgggccaccgctgcccctgcccacagtggctcctgaaagatggatcactccagctcaaagagaacatgtgggaatgaaaggacaggctgggcccaaaggagaaaagggtgatgctggggaggagcttcctggccctcctgaaccttctgggcctgttggacccacggcaggagcagaagcagagggctctggcctaggctggggctcggacgtcggctctggctctggtgacctggtgggcagtgagcagctgctgagaggtcctccaggacccccagggccacctggcttacctgggattccaggaaaaccaggaactgatgttttcatgggaccccctggatctcctggagaggatggacctgctggtgaacctgggcccccgggccctgagggacagcctggagttgatggagccaccggccttcccgggatgaaaggggagaagggagcaagagggcctaatggctcagttggtgaaaagggtgaccctggcaacagaggcttacctggacccccggggaaaaagggacaagctggccctcctggggtcatgggacccccagggcctcctggaccccctgggcccccaggccctggatgcacaatgggacttggattcgaggataccgaaggctctggaagcacccagctattgaatgaacccaaactctccagaccaacggctgcaattggtctcaaaggagagaaaggagaccggggacccaagggagaaagggggatggatggagccagtattgtgggaccccctgggccgagagggccacctgggcacatcaaggtcttgtctaattccttgatcaatatcacccatggattcatgaatttctcggacattcctgagctggtggggcctccggggccggacgggttgcctgggctgccaggatttccaggtcctagaggaccaaaaggtgacactggtttacctggctttccaggactaaaaggagaacaggactacctttcctcatcagtggagtgggcgagaagggagagccgggtgccatcctgacagaggacattcctctggaaaggctgatggggaaaaagggtgaacctggaatgcatggagccccaggaccaatggggcccaaaggaccaccaggacataaaggagaatttggccttcccgggcgacctggtcgcccaggactgaatggcctcaagggtaccaaaggagatccaggggtcattatgcagggcccacctggcttacctggccctccaggcccccctgggccacctggagctgtgattaacatcaaaggagccattttcccaatacccgtccgaccacactgcaaaatgccagttgatactgctcatcctgggagtccagagctcatcacttttcacggtgttaaaggagagaaaggatcctggggtcttcctggctcaaagggagaaaaaggcgaccagggagcccagggaccaccaggtcctccacttgatctagcttacctgagacactttctgaacaacttgaagggggagaatggagacaaggggttcaaaggtgaaaaaggagaaaaaggagacattaatggcagcttccttatgtctgggcctccaggcctgcccggaaatccaggcccggctggccaaaaaggggagacagtcgttgggccccaaggacccccaggtgctcctggtctgcctgggccacctggctttggaagacctggtgatcctgggccaccggggcccccggggccaccaggacctccagctatcctgggagcagctgtggcccttccaggtccccctggccctccaggacagccagggcttcccggatccagaaacctggtcacagcattcagcaacatggatgacatgctgcagaaagcgcatttggttatagaaggaacattcatctacctgagggacagcactgagtttttcattcgtgttagagatggctggaaaaaattacagctgggagaactgatccccattcctgccgacagccctccaccccctgcgctttccagcaacccacatcagcttctgcctccaccaaaccctatttcaagtgccaattatgagaagcctgctctgcatttggctgctctgaacatgccattttctggggacattcgagctgattttcagtgcttcaagcaggccagagctgcaggactgttgtccacctaccgagcattcttatcttcccatttgcaagatctgtccaccattgtgaggaaagcagagagatacagccttcccatagtgaacctcaagggccaagtactttttaataattgggactcaattttttctggccacggaggtcagttcaatatgcatattccaatatactcctttgatggtcgagacataatgacagatccttcttggccccagaaagtcatttggcatggctccagcccccatggcgtccgccttgtggataactactgtgaagcatggcgaaccgcggacacagcggtcacgggacttgcctccccgctgagcacggggaagattctggaccagaaagcatacagctgtgctaatcggctaattgtcctatgtatcgaaaacagtttcatgacagacgctaggaagtaatggccttctgatgattcttaaagagttttcaattttttcttatgtgaagagttgacactgaaatctaaaatgtttaattgttgtaaatattacagtttttttttttttactacatattctttacaacagcaaccaaagaaaacatacctcaatacactcaaaactgaagacatagaggactcagatcaaagacaaaatctgatccatatattggtgctagattctgcaggaaaccccagcagtgtgaacgcatcccaacataggttaagagcaagttgaaaacaaaggccatggcattctgccactgcatccttcagacagttatatcctccttttaaaccattgttgttgagtgtaagatgtccttcatgttttcttataaagtcagtgtttagaaatgttaccctttctaagttatatacagatcaaatgcttttttctttcacgtacatccatcatttgcaactgctgttcgtacacagaaacaggactgctcaaatgatcctatttgtattttctgatgctatcagactctaatgtttttttccctaaaatattattgccatcatgctttaggaattttatatttttacacaatcatattttagtatggtgtctgtttatgtaactctgacttgctggaaaagttgaaactccaaataatctgaaactagaaaagaaatagcacataattactaccttccccttggcggctctcctccccaacccccaccccacaattttatgacttccatttggcaattgttgaattataactgcgactgaaacaaacaggttcatagagatgaattttctgagaaacatatatctacatgttgtataattggattttttttccatgtaagtgaacataaaaacatcttttccgggtgctttcttcatttgactttttcccgctagttcctttattctccatcactgatgtggaagcagacctggggtgggtttgctaatcctgccacttgtgctgcccccaggcgatgatcagagaactgaaacgttttcccatcatgctcatctgccctggctgttgtcttccacctagtggggccagtgtaggttgtgtagagcctcagagtgggaaacaggatgagctgtgattctgccaccgtctcagggcatgactttgggcaagtcggcctctgtctctcaaggagattgggataagacaagcatagtattggctaccagtcattaaatatcagacttctgatatat

SEQ ID NO: 733 - protein, 814 aa, Homo sapiens
MAPRRNNGQCWCLLMLLSVSTPLPAVTQTRGATETASQGHLDLTQLIGVPLPSSVSFVTGYGGFPAYSFGPGANVGRPARTLIPSTFFRDFAISVVVKPSSTRGGVLFAITDAFQKVIYLGLRLSGVEDGHQRIILYYTEPGSHVSQEAAAFSVPVMTWNRFAMIVQGEEVTLLVNCEEHSRIPFQRSSQAFESSAGIFMGNAGATGLERFTGSLQQLTVHPDPRTPEELCDPEESSASGETSGLQEADGVAEIAVTYTQDKEAKVEPINTPPTPSSPFEDMELSGEPVPEGTLETTNMSIIQHSSPKQGSGEILNDTLEGVHSVDGDPITDSGSGAGAFLDIAEEKNLAATAAGLAEVPISTAGEAEASSVPTGGPTLSMSTENPEEGVTPGPDNEERLAATAAGEAEASMPGEVEASGVAPGELDLSMSAQSLGEEATVGPGDEEDLAAATTEEPLITAGGEESGSPPPDGPPLPLPTVAPERWITPAQREHVGMKGQAGPKGEKGDAGEELPGPPEPSGPVGPTAGAEAEGSGLGWGSDVGSGSGDLVGSEQLLRGPPGPPGPPGLPGIPGKPGTDVFMGPPGSPGEDGPAGEPGPPGPEGQPGVDGATGLPGMKGEKGRPNGSVGEKGDPGNRGLPGPPGKKGQAGPPGVMGPPGPPGPPGPPGPGCTMGLGFEDTEGSGSTQLLNEPKLSRPTAAIGLKGEKGDRGPKGERGMDGASIVGPPGPRGPPGHIKVLSNSLINITHGFMNFSDIPELVGPPGPDGLPGLPGFPGPRGPKGDTGLPGFPGLKGEQDYLSSSVEWARRESRVPS

SEQ ID NO: 734 - DNA, 6586 bp, Homo sapiens
caatgtacacactttatttgtatattaaacaagtagaaatatgtttttccccatctttctttaaacatgttcttctccccatatatcttctgtttacccatttttaacaggaacatgagcattcaacctattccattttttcttatatgcaaaggcagagtgcaactgtgataggggcaattgattcttagctttggttttggggacaatatggggtggtgggaactacggcaaactggacagtactgccttagctgaaggcagcagcccctattcaatgccaatcaattgttggcacagagaatgcaggccttatgtcgccaggttttccaaaatttcaaaaagaatccagaagtctcaattttactgtgcaattctcttttattaggattatctctgctgcatttagttgtatgtatcccttatggcccccaggcaggtccactcctgggcattcaagtcggtccatgtgtcaggcgtgcagggtgggtcacagcatctaggagctcagtgcagcttgggactttgggacatacgctccacctctctgagcctcagtctccttgtccatcatataaggaaatcactgattccagccttcctgggctgtggagaggattccctcagcggctgtgaaagagtgctttcttgcgggtcagccccgacaggacagacttaagggcgggagggagcccatcccgcttgccccaacgaacgcgggcgcggggctttcctcgcaggttacataaggcagccgcgggtggaggcagcagaggcgagcgcacgtccgtcgagggggaaaggggcgtggggaggcggccggggcggccggtatcccccgggcgtgagtgcgcagcgcgcgggggagcgcagggcgcggcggagtcgggtttcagagcgcgggtgactcggggcgcgggccgggagccgggattctgcccgccgccgccgctgccgagcgccgcctttgttccctgcaggaagggcgagcgcggcggccagcgctcagcgacccttcgtcctccgctaagctccaacgctctgctcgactagccgcgcgccttccggggctccgcagacccgcgagatggcaccaaggtaagacccgcttctctgcttcctcgcgtcccgggcccctccaatactcttgcccgcctcaccttttctccctcgggcacatcttgcaggaggaacaacgggcagtgctggtgtctgctgatgctgctctcggtctccacgcccctccctgctgtcacccagacccgcggtgcgacagagactgcttcccagggtcacctggacctcacgcagctcatcggtgtcccgctgccctcgtccgtatcctttgtcacaggctatggtggcttcccggcctacagtttcgggcctggtgccaatgttggccgcccagccaggactctcatcccatccaccttcttcagggacttcgccatcagcgtcgtggtgaagcccagcagcacccgtggtggcgtgctcttcgccatcactgacgccttccagaaggtcatctacctgggcctgcggctctcaggtgtggaggacggccaccagcggatcatcctctactacacggagccaggctcccatgtgtcccaagaggctgctgccttctcggtgcctgtgatgacccacaggtggaaccgcttcgccatgattgtccagggtgaggaagtgaccctcctcgtgaactgtgaggagcacagccgcatccccttccagcggtcctcccaggctttggcttttgagtccagcgctggaatcttcatgggcaatgcaggagctacagggctcgagagattcactggctccctccagcagctcaccgtgcaccccgaccccaggactcccgaggagctgtgtgaccctgaagagtcctcggcatctggagagaccagtgggctgcaggaggcagacggagtagctgagatcttagaagccgtcacctacactcaagcctcgcccaaagaagcaaaagttgaacccataaacacacctccaactccatcctccccctttgaagacatggaactttctggtgaacctgtacccgaggggaccctggaaaccaccaacatgagcatcatccagcacagcagccccaaacaaggcaaggtctggtgagatcctgaatgacacactggagggggttcattctgtggatggtgaccccattactgacagcggctcaggggctggggccttccttgacattgctgaagaaaagaatttagcagcaacagcagcggggctggccgaggtgcccatcagcactgctggagaagcagaggccagcagtgtgcccaccgggggaccaaccctctctatgtccacggagaacccagaggaaggggtcactccaggtccagataatgaagagcgtttagcagcaacagcagcaggggaggccgaggcactcgccagcatgcctggggaagtggaggccagtggtgtggcccccggggagctggacctctccatgtccgcccagagcctcggggaagaggccactgtgggtccaagcagtgaagacagtttaacaacagctgcagctgcaaccgaagtgtccctcagtacttttgaggatgaggaagccagtggggtccccacagatggcctggctcccctcacagccaccatggcccctgagcgggcagtcacttctggtcctggtgatgaagaagacttggcagcagccacaacagaggagcccctcatcacagctgggggtgaagagtccggcagccctccccctgatgggccaccgctgcccctgcccacagtggctcctgaaagatggatcactccagctcaaagagaacatgtgggaatgaaaggacaggctgggcccaaaggagaaaagggtgatgctggggaggagcttcctggccctcctgaaccttctgggcctgttggacccacggcaggagcagaagcagagggctctggcctaggctggggctcggacgtcggctctggctctggtgacctggtgggcagtgagcagctgctgagaggtcctccaggacccccagggccacctggcttacctgggattccaggaaaaccaggaactgatgttttcatgggaccccctggatctcctggagaggatggacctgctggtgaacctgggcccccgggccctgagggacagcctggagttgatggagccaccggccttcccgggatgaaaggggagaagggagcaagagggcctaatggctcagttggtgaaaagggtgaccctggcaacagaggcttacctggacccccggggaaaaagggacaagctggccctcctggggtcatgggacccccagggcctcctggaccccctgggcccccaggccctggatgcacaatgggacttggattcgaggataccgaaggctctggaagcacccagctattgaatgaacccaaactctccagaccaacggctgcaattggtctcaaaggagagaaaggagaccggggacccaagggagaaagggggatggatggagccagtattgtgggaccccctgggccgagagggccacctgggcacatcaaggtcttgtctaattccttgatcaatatcacccatggattcatgaatttctcggacattcctgagctggtggggcctccggggccggacgggttgcctgggctgccaggatttccaggtcctagaggaccaaaaggtgacactggtttacctggctttccaggactaaaaggagaacagggcgagaagggagagccgggtgccatcctgacagaggacattcctctggaaaggctgatggggaaaaagggtgaacctggaatgcatggagccccaggaccaatggggcccaaaggaccaccaggacataaaggagaatttggccttcccgggcgacctggtcgcccaggactgaatggcctcaagggtaccaaaggagatccaggggtcattatgcagggcccacctggcttacctggccctccaggcccccctgggccacctggagctgtgattaacatcaaaggagccattttcccaatacccgtccgaccacactgcaaaatgccagttgatactgctcatcctgggagtccagagctcatcacttttcacggtgttaaaggagagaaaggatcctggggtcttcctggctcaaagggagaaaaaggcgaccagggagcccagggaccaccaggtcctccacttgatctagcttacctgagacactttctgaacaacttgaagggggagaatggagacaaggggttcaaaggtgaaaaaggagaaaaaggagacattaatggcagcttccttatgtctgggcctccaggcctgcccggaaatccaggcccggctggccaaaaaggggagacagtcgttgggccccaaggacccccaggtgctcctggtctgcctgggccacctggctttggaagacctggtgatcctgggccaccggggcccccggggccaccaggacctccagctatcctgggagcagctgtggcccttccaggtccccctggccctccaggacagccagggcttcccggatccagaaacctggtcacagcattcagcaacatggatgacatgctgcagaaagcgcatttggttatagaaggaacattcatctacctgagggacagcactgagtttttcattcgtgttagagatggctggaaaaaattacagctgggagaactgatccccattcctgccgacagccctccaccccctgcgctttccagcaacccacatcagcttctgcctccaccaaaccctatttcaagtgccaattatgagaagcctgctctgcatttggctgctctgaacatgccattttctggggacattcgagctgattttcagtgcttcaagcaggccagagctgcaggactgttgtccacctaccgagcattcttatcttcccatttgcaagatctgtccaccattgtgaggaaagcagagagatacagccttcccatagtgaacctcaagggccaagtactttttaataattgggactcaattttttctggccacggaggtcagttcaatatgcatattccaatatactcctttgatggtcgagacataatgacagatccttcttggccccagaaagtcatttggcatggctccagcccccatggcgtccgccttgtggataactactgtgaagcatggcgaaccgcggacacagcggtcacgggacttgcctccccgctgagcacggggaagattctggaccagaaagcatacagctgtgctaatcggctaattgtcctatgtatcgaaaacagtttcatgacagacgctaggaagtaatggccttctgatgattcttaaagagttttcaattttttcttatgtgaagagttgacactgaaatctaaaatgtttaattgttgtaaatattacagtttttttttttttactacatattctttacaacagcaaccaaagaaaacatacctcaatacactcaaaactgaagacatagaggactcagatcaaagacaaaatctgatccatatattggtgctagattctgcaggaaaccccagcagtgtgaacgcatcccaacataggttaagagcaagttgaaaacaaaggccatggcattctgccactgcatccttcagacagttatatcctccttttaaaccattgttgttgagtgtaagatgtccttcatgttttcttataaagtcagtgtttagaaatgttaccctttctaagttatatacagatcaaatgcttttttctttcacgtacatccatcatttgcaactgctgttcgtacacagaaacaggactgctcaaatgatcctatttgtattttctgatgctatcagactctaatgtttttttccctaaaatattattgccatcatgctttaggaattttatatttttacacaatcatattttagtatggtgtctgtttatgtaactctgacttgctggaaaagttgaaactccaaataatctgaaactagaaaagaaatagcacataattactaccttccccttggcggctctcctccccaacccccaccccacaattttatgacttccatttggcaattgttgaattataactgcgactgaaacaaacaggttcatagagatgaattttctgagaaacatatatctacatgttgtataattggattttttttccatgtaagtgaacataaaaacatcttttccgggtgctttcttcatttgactttttcccgctagttcctttattctccatcactgatgtggaagcagacctggggtgggtttgctaatcctgccacttgtgctgcccccaggcgatgatcagagaactgaaacgttttcccatcatgctcatctgccctggctgttgtcttccacctagtggggccagtgtaggttgtgtagagcctcagagtgggaaacaggatgagctgtgattctgccaccgtctcagggcatgactttgggcaagtcggcctctgtctctcaaggagattgggataagacaagcatagtattggctaccagtcattaaatatcagacttctgatatat

SEQ ID NO: 735 - protein, 988 aa, Homo sapiens
MSTENPEEGVTPGPDNEERLAATAAGEAEASMPGEVEASGVAPGELDLSMSAQSLGEEATVGPSSEDSLTTAAAATEVSLSTFEDEEASGVPTDGLAPLTATMAPERAVTSGPGDEEDLAAATTEEPLITAGGEESGSPPPDGPPLPLPTVAPERWITPAQREHVGMKGQAGPKGEKGDAGEELPGPPEPSGPVGPTAGAEAEGSGLGWGSDVGSGSGDLVGSEQLLRGPPGPPGPPGLPGIPGKPGTDVFMGPPGSPGEDGPAGEPGPPGPEGQPGVDGATGLPGMKGEKGRPNGSVGEKGDPGNRGLPGPPGKKGQAGPPGVMGPPGPPGPPGPPGPGCTMGLGFEDTEGSGSTQLLNEPKLSRPTAAIGLKGEKGDRGPKGERGMDGASIVGPPGPRGPPGHIKVLSNSLINITHGFMNFSDIPELVGPPGPDGLPGLPGFPGPRGPKGDTGLPGFPGLKGEQGEKGEPGAILTEDIPLERLMGKKGEPGMHGAPGPMGPKGPPGHKGEFGLPGRPGRPQGLKGTKGDPGVIMQGPPGLPGPPGPPGPPGAVINIKGAIFPIPVRPHCKMPVDTAHPGSPELITFHGVKGEKGSWGLPGSKGEKGDQGAQGPPGPPLDLAYLRHFLNNLKGENGDKGFKGEKGEKGDINGSFLMSGPPGLPGNPGPAGQKGETVVGPQGPPGAPGLPGPPGFGRPGDPGPPGPPGPPGPPAILGAAVPGPPGPPGQPGLPGSRNLVTAFSNMDDMLQKAHLVIEGTFIYLRDSTEFFIRVRDGWKKLQLGELIPIPADSPPPPALSSNPHQLLPPPNPISSANYEKPALHLAALNMPFSGDIRADFQCFKQARAAGLLSYAFLSSHLQDLSTIVRKAERYSLPIVNLKGQVLFNNWDSIFSGHGGQFNMHIPIYSFDGRDIMTDPSWPQKVIWHGSSPHGVRLVDNYCEAWRTADTAVTGLDLSTGKILDQKAYSCANRLIVLCIENSFMTDARK

SEQ ID NO: 736 - DNA, 3885 bp, Homo sapiens
caatgtacacactttatttgtatattaaacaagtagaaatatgtttttccccatctttctttaaacatgttcttctccccatatatcttctgtttacccatttttaacaggaacatgagcattcaacctattccattttttcttatatgcaaaggcagagtgcaactgtgataggggcaattgattcttagctttggttttggggacaatatggggtggtgggaactacggcaaactggacagtactgccttagctgaaggcagcagcccctattcaatgccaatcaattgttggcacagagaatgcaggccttatgtcgccaggttttccaaaatttcaaaaagaatccagaagtctcaattttactgtgcaattctcttttattaggattatctctgctgcatttagttgtatgtatcccttatggcccccaggcaggtccactcctgggcattcaagtcggtccatgtgtcaggcgtgcagggtgggtcacagcatctaggagctcagtgcagcttgggactttgggacatacgctccacctctctgagcctcagtctccttgtccatcatataaggaaatcactgattccagccttcctgggctgtggagaggattccctcagcggctgtgaaagagtgctttcttgcgggtcagccccgacaggacagacttaagggcgggagggagcccatcccgcttgccccaacgaacgcgggcgcggggctttcctcgcaggttacataaggcagccgcgggtggaggcagcagaggcgagcgcacgtccgtcgagggggaaaggggcgtggggaggcggccggggcggccggtatcccccgggcgtgagtgcgcagcgcgcgggggagcgcagggcgcggcggagtcgggtttcagagcgcgggtgactcggggcgcgggccgggagccgggattctgcccgccgccgccgctgccgagcgccgcctttgttccctgcaggaagggcgagcgcggcggccagcgctcagcgacccttcgtcctccgctaagctccaacgctctgctcgactagccgcgcgccttccggggctccgcagacccgcgagatggcaccaaggaggaacaacgggcagtgctggtgtctgctgatgctgctctcggtctccacgcccctccctgctgtcacccagacccgcggtgcgacagagactgcttcccagggtcacctggacctcacgcagctcatcggtgtcccgctgccctcgtccgtatcctttgtcacaggctatggtggcttcccggcctacagtttcgggcctggtgccaatgttggccgcccagccaggactctcatcccatccaccttcttcagggacttcgccatcagcgtcgtggtgaagcccagcagcacccgtggtggcgtgctcttcgccatcactgacgccttccagaaggtcatctacctgggcctgcggctctcaggtgtggaggacggccaccagcggatcatcctctactacacggagccaggctcccatgtgtcccaagaggctgctgccttctcggtgcctgtgatgacccacaggtggaaccgcttcgccatgattgtccagggtgaggaagtgaccctcctcgtgaactgtgaggagcacagccgcatccccttccagcggtcctcccaggctttggcttttgagtccagcgctggaatcttcatgggcaatgcaggagctacagggctcgagagattcactggctccctccagcagctcaccgtgcaccccgaccccaggactcccgaggagctgtgtgaccctgaagagtcctcggcatctggagagaccagtgggctgcaggaggcagacggagtagctgagatcttagaagccgtcacctacactcaagcctcgcccaaagaagcaaaagttgaacccataaacacacctccaactccatcctccccctttgaagacatggaactttctggtgaacctgtacccgaggggaccctggaaaccaccaacatgagcatcatccagcacagcagccccaaacaaggcaaggtctggtgagatcctgaatgacacactggagggggttcattctgtggatggtgaccccattactgacagcggctcaggggctggggccttccttgacattgctgaagaaaagaatttagcagcaacagcagcggggctggccgaggtgcccatcagcactgctggagaagcagaggccagcagtgtgcccaccgggggaccaaccctctctatgtccacggagaacccagaggaaggggtcactccaggtccagataatgaagagcgtttagcagcaacagcagcaggggaggccgaggcactcgccagcatgcctggggaagtggaggccagtggtgtggcccccggggagctggacctctccatgtccgcccagagcctcggggaagaggccactgtgggtccaagcagtgaagacagtttaacaacagctgcagctgcaaccgaagtgtccctcagtacttttgaggatgaggaagccagtggggtccccacagatggcctggctcccctcacagccaccatggcccctgagcgggcagtcacttctggtcctggtgatgaagaagacttggcagcagccacaacagaggagcccctcatcacagctgggggtgaagagtccggcagccctccccctgatgggccaccgctgcccctgcccacagtggctcctgaaagatggatcactccagctcaaagagaacatgtgggaatgaaaggacaggctgggcccaaaggagaaaagggtgatgctggggaggagcttcctggccctcctgaaccttctgggcctgttggacccacggcaggagcagaagcagagggctctggcctaggctggggctcggacgtcggctctggctctggtgacctggtgggcagtgagcagctgctgagaggtcctccaggacccccagggccacctggcttacctgggattccaggaaaaccaggaactgatgttttcatgggaccccctggatctcctggagaggatggacctgctggtgaacctgggcccccgggccctgagggacagcctggagttgatggagccaccggccttcccgggatgaaaggggagaagggagcaagagggcctaatggctcagttggtgaaaagggtgaccctggcaacagaggcttacctggacccccggggaaaaagggacaagctggccctcctggggtcatgggacccccagggcctcctggaccccctgggcccccaggccctggatgcacaatgggacttggattcgaggataccgaaggctctggaagcacccagctattgaatgaacccaaactctccagaccaacggctgcaattggtctcaaaggagagaaaggagaccggggacccaagggagaaagggggatggatggagccagtattgtgggaccccctgggccgagagggccacctgggcacatcaaggtcttgtctaattccttgatcaatatcacccatggattcatgaatttctcggacattcctgagctggtggggcctccggggccggacgggttgcctgggctgccaggatttccagtaagtaccaccctcgctgtcttctatctgtgccccgtggctgcgatcattctgttccttccacctagaatggcatttcctccatctatgcatgactgagctccaggggcatcttgttcattaactttttcttgatatttttgatagggtcctagaggaccaaaaggtgacactggtttacctggctttccaggactaaaaggagaacagcagggcgagaagggagagccgggtgccatcctgacagaggacattcctctggaaaggctgatggggaaaaagg

SEQ ID NO: 737 - protein, 477 aa, Homo sapiens
MSTENPEEGVTPGPDNEERLAATAAGEAEASMPGEVEASGVAPGELDLSMSAQSLGEEATVGPSSEDSLTTAAAATEVSLSTFEDEEASGVPTDGLAPLTATMAPERAVTSGPGDEEDLAAATTEEPLITAGGEESGSPPPDGPPLPLPTVAPERWITPAQREHVGMKGQAGPKGEKGDAGEELPGPPEPSGPVGPTAGAEAEGSGLGWGSDVGSGSGDLVGSEQLLRGPPGPPGPPGLPGIPGKPGTDVFMGPPGSPGEDGPAGEPGPPGPEGQPGVDGATGLPGMKGEKGRPNGSVGEKGDPGNRGLPGPPGKKGQAGPPGVMGPPGPPGPPGPPGPGCTMGLGFEDTEGSGSTQLLNEPKLSRPTAAIGLKGEKGDRGPKGERGMDGASIVGPPGPRGPPGHIKVLSNSLINITHGFMNFSDIPELVGPPGPDGLPGLPGFPVSTTLAVFYLCPVAAIILFLPPRMAFPPSMHD

SEQ ID NO: 738 - DNA, 39401 bp, Mus musculus
  misc_feature (1)...(39401): n = A,T,C or G
tctttatatattttggatattagtcctctactggatgtggagttagtaaaaatcttttcctgctctgtaggctgcgctttgtctgattgaaggtgtctttgcttttcagtttcatgaggccctgtttactaattattggttttagcacttgtgttaccagtgttctgtttaaaaagtcatctcttgtgcttattttattgatttaaaaaattttctagcctattgatatcagccttgagtttggttatttcttgccatctactcctttcaaatccagaaagtctttaatttctttcttgactcatttttcattcagtagttgttcagtgtccatgaatttgtaagctttctgctgtggttgatatccatctgttgtaggataggatgcaggattttatattaacttccttgcatctgttgagacttgctttatttctgaatatgtgatcagcacccatgaggttcagagaagaaggtatattcttctgtgtttgggtcaggtgttctgtaactgtatgttaggcccttttggtttctaatgtcagttggctccagcatttcttggtttaatttttgtctggatggcctgcccattgttgagcatgggatactgaggtctcccactatcagcatgttagagtcaatatgtgattttaaactagagtagtgttgcttctatgaactttagtgcccttgtgtattgtgcatagggtatttcctttgatgagtgtgtagtgtccttctctatctcttcggattagttttggtttgaagtctattttgttagatattaaaatggctacacgtgctttcttcttatgttcatttgcttgtaatatatttttccatatttttaccctgatttgatgtctcttcttgatgtgaagatgtgtttcttggatgcagcagaaggaaggatcctgtttttgtatggacctacattgtatccatatatgatattaaaaggtctttttcttgtgtttcatttatgttgcaatatgtagggcctgatgtgatagggttgttggattctagtggaaacattgtccattggttgggtatttaagctggcatatttgtatctgggtttggaaagattgtaattctaggtgctgatgtctggtcttgtctttgttgaatggatgttttgttccttggtttctgtttcctctctggttcttaagagagttaggagttgtgtgttgcctggtaggaaattctcttgggatcttaatatgtgtggccactggggttccaagtaaactatgtttctaggtattgggagatgacacttatcaatggggatgggcttggggtgtcgaggaggtctataggaggcaggaaagcaaggtgctccactaggattgcctacactcctgggaaggttgtcagagagcaaggagagtccgcagcagcaggtgtctgctacagagctgtggattaaactggggactggatttgaggagaggaggaatactgaaggtctgaagcttgcctctttgcttctctgtctggcttggctggagggttcccagagaaagcctattggagttggggaggaggatgagttaggagggggggtcagaggagcaaatctgtgtgatctgctggagacgggagcagagaggactggagtccacagcgggtggtctgctacagagatgggggtgagactggnnnnnnnnnnnnnnnnnnnntcttttttctttgttagtccctccctcccttcttcccttcctccctccctccttccctcctccttcttcatatgaaccaggaacattcatatgtcacctttgatggcctctcctgcatcatctgcacctgcttggatggtcagtacaccaggtgaaaatttctctggtccctcgtgttggcttttcctgcaggccatgttctgtgagagttgagtgctttgttctctccaggttcccatttgatttcagtggacattgaatgtagatcactgctctcactcagaagaaatcctttggagagaacttcattttcaaagaagggattttcatctcgataacaatctcttctgcaacctgattttacagcttcaaattctgtcgtgtgaactctggtcaaatactgcagagcctctttattctcctcctcaagtggtgcagattcttttggatggtccgcaaatgttgttacctgaagtttgggattttagccattaattctgacttctgagaaaatggttgatggagagtttgtatttctgttctcttctcaggtttcctcactgggatgcttcttaacctcatctgtttcattttgaccatcatcactatactcaagcatttcttgctattcatcgtctctttagcaggtcaggaaggggtggctttctaccagctttgaggcaggagccagtctgggttgcttggcctgagacaggaacacagattgttatttctgggccgtgcacagaagaaagtattcagaagaagaggctggagtttagatgctcacagcaggaggaaacccaaagtgaagtaaggcagttaagagcctcagtagcatcgctagaagggcttggaagacaaggcagaggactggatccttgagtaaatgggaaattgaaatgcaaatgaacagaatacaggagagctttgagacaccaagaaagatctaattgccaaattatgggtagaggaggaaaatatcatgataaaagcttggagaatctcttcagtaaaatcacagaagaaaatttcccacgcctagagaaagagatgtgtagaggtttgctctggttctttctcgcagtcccaagctcccagaaataagactcagattcaaagtatatttacaaatacctagcccatgtagctaggctcttctcggactagatcataacgtaaaataacccatttaccctgacctacactctgccacattttgtacttaggcaccgtacatccctctcaatgtcacttcttcctggtgaatctcctgcctgacactatcccagaattctttctgcctagtggatgcctatccaggtctaagaagcttacagaacaccacatagacaagaccagaaaaaaaaattcctgtaatatattaaaatttcaaaataacagtggaattaattttagggcctcacattctgcattactttgtatagataacttctttaaattttttaaattacatttaaaattacattttatttgtgtgtgtgtgtgtgtgtgtgtgtgtgtgcgtgtgtgtgtgcatgctacaatgtgtgtgtacatgcatggtgtgtttgtgtgtgtgagtgtgtgtcacatgcatgacacagtgtgagtatgaagatcaaagaacagcttttaaaagttgtttctttcctttcaacttcagagagtgggggcagggttctatatagagacagactgaactcgggttgtcaacaacttgttaacatagagactgttgccatggaatatgggtgttttattatttctgtgtttccaaacacatcttgatataatgagatgcagagaacaatatcagggcaattcaaccctatgatggtccctctggttccctgaggctcagcatggtaataaagtcttttcaagttcatggagataaactcaagccttagctctaaggtctggtttcttcctctacccttccatttgtcgcagtgtcagtcaaagccaagctgctgagacactacagctgccacggctcaagcagacacagggcacgtacccttcatcccctgtaccacctgatcagatagatgactcagtggccatgactactgaatgtgggtgggtcaggcaggaccctaacacctcagggttccccaaattggaatgcgccaggctgtcaagagtaacaagaggagggacttgttcctctctggtgcttttcctggggtcaaacgagacatctcatcaccaattaccgtaaagccaggttggaaggaaggagagagggagtaacttcagggagataattggacagatgagagctttcagtccctttaactaaccctggaactcacattgactttaaaggaagagaatatatatatatatataaaatagttgtttcaaaagaatattgaggatgaaatatcacttacataaggggaagatagtgcctgttcatcttaattagctggaagtcagtcctgtaccacaggggcatcacaccacgtgggtggatccacactgtgctggaaagagcaatagcagcgcctgtcagtcccctgtactcatctcagggggcgttagggccctgcttgctggtgctgcagatcaagcttgttaagataaagttgggcgggtgcttgcaatcacttgcaaagcctccccctgccgcaggcctgcccacttttcctgactcagaggtctatgttctttttcctcgtccatttctttccgatgtcagtcaaagcctgtgcgtgctgcccctgacactctaggcctcatgtgttctctgaagacttacttcatcctccacccacttctgccttgctgctgctagccaagctccagggctgagcccagcaggctttcttgtatcctaacctaaaaggtgtgattttctttcttcctctctttcaggcaactgccgcagtctacagcctgagtgccctgctgtttttccctcaaaatttgatacaaaataaaagatttatttttttgtcttggtgagagagtatgaagggtgctgtgggggaggccacgttgttctgagctgccttgctttctgcctctctgtcaccatgtgtgactttaatttcaaatcctcttttgaagtacctggtgaaacacttggtgatttttcgggtgacacataagtacagatttcagcagcctttataggacacttgaaaaactgtaagatctgtagaaatataatttgtgtgcttctttgtgggttcatcacatattccaggtaagatgtgctgcttcaggaaagctatgcaaggcactcttcccttcttctaagtttccctcataatgactaatcaatcaatcaatcaatcaatcaaccaattcaatagaggcacatgacaaggttgctctgagatcaccctgagctaatgaatggcgtgaggtgctatgaggttctgtggttggactgcagcacactcatgtagaaaaggtactattgagtagagaatagaattttagctcactcaaggctaaatgtttcataaacgagaagtaagctatagctgggcagtggtgatgcacacctttggtcccagcacttgggaggcagaggcaggtagatctttgaatttgaagtcaaccttgtctataaagtgagttccaggacagccagggctacacacagagaaacctgttttgacacacaaaacaaaacaaaacaaaacaaaagctgttgtgaacttgactttttttttttactgtgataaaaagtcattctgtggaggatagttgttcatggtgtcaagttttcataggactgaaaaatgaacttttcatttgggagttgccctttgagtgaagcaaggccccctagcacgcctcggaatatcatttaaggacatatgcatatatcactcatttctcgcccacccacctacccacccaagcagctcatagactctcagagaatgagggtagagaacctcatagagtaggggcagggttaaataaacaaacagccagacagcaaggcaagcacactcttaaaggaaacctagagagctgtgttgatgctctgagatcaggaggaagaaacaggtcctcctccagggtctcgtgcccttgtgcctctctggagtgcaattctcttttgtgtgtctgagttactcaagttaaatcaaattacaatgtcctgagttgagcatagttttatgggaatgtacttagaacttgggattcataaaattctcaagacacaagacacaatctagcaggaaagaaattcaatgagaaattaaaaagcaaacagaagctacagaaggaacacacaaatgcagctatggagaaatgacaggaacatgtcaggctccaaagtgttcagacattgaaatattcagaatataaaataaccacattaaaagtacttgaataaataaccagggtaattagaaacacagataatgaaaaaggaagtattaaacaaacctagtcctggtgtatttgaccaaaaaaaaaaaatagaactcaagagctatggtaaaatggatggtgcatggcctgagaactaccagggaagtactacagagtagagatgggagataagaccacgtgactatgagactgaggagagatgggaggtaacaccatataactaagagaaatgagaggtaagatcatatgactaagaggcaggagagacgggaggtaagaccacgtgactaagagacagagaagaccatcatagatcgtttagaaatccaggatcagggaagaacaggaattgggaaactcaacatctaaaagaaataatgccttagaattttctaaaactgatattactccttacttctagaaactttagggacggtttgtgtaaaaaataaaaacatcacaaacgttgaagcaaatcctgaaactctagtgacaaaaagaatatagaaagaagtaaaattatgtataaaaaatgacaaaggacagggagccgactccgtgagaatgaaaacaacagcgagcaaagaactgttcggtcaggggctgctggatcagaagggccaaaagcttttccatcattgctttctactaaagggagaattgaaaagctctctctgactgagggagaaagcttccgatgggctgaggaggcaaaggcaggcagctacaagttctgggagaagaaaatgggcttttggctgtctactgatgatctccagcaagccagttaaaaaggttaagcagttgggctgcagagccaggtgagccagtggagacaggagtctagcaacgatccaaggctgagctgttagcaagtgggtcataacaattcattttaattttcattttcattaactaataatggactcaagacggctctaaactcacgtctccagccccaaggtgttgcattatttcaaggcttacacatccaactccatgctggtcaatccattatgtactatggataaggcttctaaaaagatgtaacagtataatataaaatgtggcaaagactgcaaacaggggagaaagcaaggcaaggacacagtaacatgggggagaaacagcgttaggagggacaggagaaacccctgtgagcaagactcttggagcagaatcttgcagacatcagggaggaagctctttggaggggccgtggaacattccattgggagaacagcagagggagcagcttgtaggaaacaggacagaaaggccaagtgtccaggaaatgtcaacaaaccaactgttggatcagtgacaacaaggaagaggcaaggatcaaactcactaggttaggaaacagagatgagcaggctgggtccgagagccctgcatttatgtagtgctctgaagacttcgcagtgtagagaagagtgcagaaatcaagacaggatgctgtgaaccaagccttggtgcgtctacatgaggaaagatgaattacctgccaaaggcaaaccaaggcaaaacgtagatcaaatacaactgcatctcacagtactaaagcaaaaatgaaacctcaacctcccctgccccccaggccccagtcttagggtttttattgctgccataaaacaccaggaccaaaatccaagttggggaggaaagggtttatccttctgttacttcatcattgacagaagtcaggacaggaactcaagcagggcaggaactggaggaaggagctgatgcagaggccatagaggtgctgcttactggcttgcttcccctggtttgctcagtctgctttcttacagaacccaggaccacccagggatggcaccacccacaatgggctgggccctcccccattgatcactaattgagaaaatgccttacagatgaatctcatggaggcatttcctcaaccaaggctccttcctctctgatgattgtatcacgtgccaggttgacacacaaaaccagccggtacacctccaagcccaccacggaataccatttaaggacatacgcatatatcacacgtacatctggaaaggggcatcgagcacacatttaggtggtggtagtggagattgtgactagacaggtgtgggaagtgacttcaaggatattgatgagtttttaagtattttaagcgggagggtggacttgggggcatgatataatctcatcaatggacctcccatgtcaaaaacagttcgtagagggcggaggagatgtctcagggcataaaagcacttcccaagcatacctggtgacttgagttctatctccagagcccatggtggaaaaaggcaagcaattcctggaatttttcctgtgactgtgaccacaagtgccagcgtacacacacacacacacacacacacacacacacacacacagtcacagagtcacacacacacagtcacagaatcacacacacgcagtcacacacacatatgcattcacacacatgcaaacacacacacacacacacatacacacacaaaacagtaattcattaatacaaagtttataccacatgaaaacaataacaacagccaagtccctataaattcttgctggggatattgatcactggtagagtccttgcccaacatgcttgaggctctgagttcaaccagttgccagaaacaaacacacacacacacacacacacacacacacacacacacacacacacagcagagtaaaacaaaatagaaccctcatggctacccccccccccagtcctattccatatgactttcaatgctgtcaacagaacagaacactatgaagctctaggtcacagagcattgctggggagaaaggcaagacaactggtaacccagctccatcctcctagaacaggtaaggatgctctccgatgcttagatggatgctagtaacaactgactgtcctgctttccttaagatgaatacatggtctgtttgtaaggaggctctctgtattaagcacaagagcaaagcactagcaggtacgcgatgcatagcatccttgagtgtccctggcagtgtgttaaaagagctggtggtggggagaaatgaggtacagctggttcctaaactccccccaggtaaagtggctcctgcctcaccattgcgcatccttgcctgcagggctggactgtgcaacccgcactggtgcatctccacagagctttcccacgagcaccctgtcctacccttctgtgcacaatctgtttctggccttgtgtctagcagttgtggtcactcaccgctggaggacgctggcgttttggaaagcgatatagttacccggtacctacatgcaagagcaggtctttcttttggactgctagaagcagtggctcatagttggtgtggcccccgcctcccttctcagcagagcggcctttcaccacagtcaaatgactcttcacaaacacttcactcgtcaaggcttccgtttgtgtcactcagatgagtaatgtctggtggaaatgatggatccccgaggtgaacagcgtgcgtgcgtagggtacgctggtaaagaaaactcgggcagcctgtgctttgtgtctttcctgcttcttcactccctagcttgtgactggacgagggagggagcgcggcagagaatatcacagaatcccggtagcagtaccaacccttgatttcagtgggatttatttctgctcttccagggagcgggaaaaaccaaaggtaccaattggcaggagggctgcacagcctatcgcctcagcctgcacacagggaccagagtggcagcggggcagcacgtagagtggagccccatttccagcaaggaggtgggctgccacctatccggctgagaaggcacacaggggtgggggcgggatgcatttgaatattcacagtccctcaggtaaggcagaatctctgctggccactggggatccgtgagagaggctcgccctgcagaggacccgggactaagagggagccgcagcgccagcgccagcgaggcagggaggtggatcttagtgcgggaagctcagcgaccctcttcaccattgaaggtgtgcatcgctgggctctgcggagcttggcgggaagaagaggctcaaagcaacaggtgcaacctcaaggcactgaaagcaaggggacgcagctcacaagggccaagggattgaacccataaccgctcagaagattctccgcctgcggagagctgcggaggagtcccacccgtccagcttgctgactgcgagcagtgagagtcgcctagacccgtacctctgtgttctggagcctgccgcccccgcacgggaaaggcttagctcgggacttgcagcaccgcctcctctttagccaggccaggcacgaggatagtgtgatcgggcacagccagggtcgctcttccaggctttcttgcgggttgcgggaggtactagttggagacgcgcgcgctcgctctcgccgctctgtcctgggccactccgtgatcctaggctacctccagagccagttttccctggctggcacaactctccagggcgctccggtccgttgcacagcgccccaagggggtatcccagtaagtgatggaactggctatggtgaacctcagtgaagggaatgggagcgacccagagccgccagccccggagtccaggccgctcttcggcattggcgtggagaacttcattacgctggtagtgtttggcctgattttcgcgatgggcgtgctgggcaacagcctggtgatcaccgtgctggcgcgcagcaaaccaggcaagccgcgcagcaccaccaacctgtttatcctcaatctgagcatcgcagacctggcctacctgctcttctgcatcccttttcaggccaccgtgtatgcactgcccacctgggtgctgggcgccttcatctgcaagtttatacactacttcttcaccgtgtccatgctggtgagcatcttcaccctggccgcgatgtctgtggatcgctacgtggccattgtgcactcgcggcgctcctcctccctcagggtgtcccgcaacgcactgctgggcgtgggcttcatctgggcgctgtccatcgccatggcctcgccggtggcctaccaccagcgtcttttccatcgggacagcaaccagaccttctgctgggagcagtggcccaacaagctccacaagaaggcttacgtggtgtgcactttcgtctttgggtaccttctgcccttactgctcatctgcttttgctatgccaaggtgagtgaggagcgctggccaggctcctatgcagctcttagtgaccggtgaccctgaccctggagcttcctggagcttcatgtctccgcgacactcccccactctctatcccgttccatttcacttttgtctcagcttgctttctccgatatcatttgtggagcaaaaaaaagttaacttggagtttgagagatggcagggtaggggggcgtgggggtggggtggggaggggagagtgcctgaagtttgcagttgaatagaaagactttatctctgctctccttcaagggcgctgcagctcagcacctgatcacttcagggttcagagaggcagttgtgtgtcttggatcacttctcaaaaggttagagcccccttagtttcagcagcttttaaacaaaattggtgggctccaagaaaggaatacaacagaacaaaggaggctgcagggtcaatgctccctctaagagccagccatgggccatggtggattctagtcacccctcttagctctctgctgagacctgctagtgtggtggtccctggagccaagctcttccaacaaagcagcacactggcacctgcaccttggtgagttttcagagtccagactccataaacggcagcacatcaggttgagggctttgggttttagtttagcattctaaaaaccaagtgggaagcccttcttccccctagagacctggctgaagtccccgggggaactatgggtagaaggacaagtgctaggaattcagatggtgagcaagaacacacagctgggggagctgagtgtttatcctgtctccctgtattgggaaggactggtggctcacaagctcctaagaattacacaacactgtgcatttatgttaaccaaaccccgtaaacttcttaggtgctatttgttgatggtttatgaatccagagtgtattgttggtggccacttgatgtggttcttggggtaacctctgtcataatatttccttccagggtactatctaatgtaaattctgaggttttcatgtaactttatccttccctgactccaagtctgtgccagcaacaccatatacaaccccccccccccatgtagaaaagcaatggttccttacatttcactcataagggacccatttaaagaaggccatcttcccacctttgtatgatatgattgtgtctcttttgaatggcaatattgcttcagtgagtgtcactggatcaaacttgcaaggatagccttgctggttggaaatggctgatttattcatttggtctttgcaaatgcaaagcaaaggctgctatgcacctggagttttggggtgcaggctcacatccatgaatgtgcccagtaagcctccgggtgggagctgctatctctattttattaataagaaaaagtactttcaggacaatgcagtgactgaccagatggtaaggttggtaagttatggaggaagagtttcaggaggtgacagtccatcccttctatagcctgagctatagaagagaaacagagctaagaaaaaacacatttagaatgtgttagctcatggatgtttcagcaaattcagtgttcttaggtgcttcaaattgctgaacttggatccaacttagttggcctgactgtttaaatccaagtaacaccaagaagttggccaccgccgacgctcatgtcctagagcagattctcttggtatctcctccatccttttccccccttgacctatagtattgtgatctgtggtctttagacaacttcctttgggaactcagcatctctagtgatttatgattacttagcagaactatcagagacataagctagttttaataagtttgcaaatagtgacattgatgcaaaagatgtttccagctaggaagaacacttgcttagaagcccttatgctctcttgccagtgtcatattgggtagaaatgacgacatgactgtcgttgctgttgttacatatagggattcacaagcatgctggccgttgccagctagctggtcagccctgagtccatcagcaggctcctggctccagccctcaccttcctcttacaagtttttcagattgctgctattgaaaacttctctgtactttctggcggcaggacagagctactccagcattggtgttatcagtcagttatccacttgcttccacagcaatcgaagactcatttggttgtgagacactgaagtggtttcaggcagtgagaagtctctcagtagggcaagaagtttgaagacagaaattcacactggagaaggctgctagggtgactgctttgctgctggggtagagaaggctggtaactgaatcccgaggtttcttaattagaacatgactgatggtgctggttggagctgaatggagcagacttctgcagtaaggccaattcgattaagttatttccatgttgtggtgttagagggaaacatccaagtggctggaacatgcacccactccccgagcgcttcttcagaaatccagtccattccaagctccttgctgtatattccaggttctccatcagaatagggaaacagacctaggaccagccctgcagggcaggcactgtggagaaagtgcagattgtgaattcctatgtacaatagcaatggctaccctaacatcatttctccaacgtatgacagaggcaagagagagcagaagtgatttctcaatttaccaaagtgatcttatctccttgacaggtatgctaagtataaaagctgcaggattgaaaaaaaaaatcaccagcaatgttgaattcctaagggtgttgtctaaagaccacacagcatttgaattatacatgaaaggagccctgctggcttgtgctttgctctagagcagtggttctcaaccttcctaatgctgtgaccctttagtacagttcctcatgtcatggtgacccccaccatgacataatattatttcctgttgctacttcaccgctgtaattttgctactgttaatgaatcgtaatgtaaatatttttggagatagaggtttgcaaaacaggtcgtaactaggaaggttgagaaccactgtcctagaggtctgaaatgagaggctttcatagatagctccaggaactgtcgcaggactgggcaaccacactgaacaactgtcagttatattctcttccttgttcggttggctttctcccctgggtggtgaacctccacagcctgggtctctagtttacaatatgtctctaagctgtctctgtgtcccatgtatgtaataggacctggtgattttaagcatgtggattctctgacggaagcaaggccgtaagagcaggagatttgcttgagtcagcgccaccccacctcaggagaggctctttctccaagaaacttggagcctggtttatgctctctgtggctctatccagacctgggtgtggtctgtcttccagggatacttctaaacacagtcagctgctcggattcagggctttaaaaaaatctgaaatgcatttctaattttgttgttttataagcactagtgttaccatacccaagctcagtggttgtcactgaagaagaggcagcgtgcaagtaaaacctgaagttaacccgcttcatccggttatgttttgcaggtccttaatcatctgcataaaaagctgaaaaacatgtcaaaaaagtctgaagcatccaagaaaaaggtaaattcacacacagatgcggttcctgcccattttcgagagcttagttgattgttgttttagattattttcacatccagccacaggttcgaggaccagttgactgaggtgtacattttcaggaactgccacagctaaagggtcgggtggagcaggagtcacatcaagaaggtggcaggtgaagaccagacagggtagggaggccaggaaagacagacagacttccagagggaaggcttagatcagggagaactcagatgtaatttgcatatagcatattagggatgattcgaaactgtcagtttgcttttcactggggagagcattggtgcgtcacctcttcagcctcaagggcaagcaggttccagccttacctctcccctagacttcggctgtccttggcatggaaaagacagaaagtaaaatcgctgggacccgatccctctttctcatctagggcgtcccacctgacactttcttctgcataacaatactaaaagcttctaatttcctggggtccactgcatcttcattcaccgaagcaaactgttttacacaccaggattaatttatcttttactgtaatgaaatctatgtgatttctaggtttagagagtggaatgaaattattagacaattttattagagggaagataaccagacattttaacccgcatgcattactgaatgtatgtttaaatgccctttttccctttctaaatacttattctgatcagttatagatattttgtaaataatcatccagatgatcgtgtttactctaaaggtcttgacttgagtacagcctgctctgcctttcctgatcattcacatcagcgtggagaagacccacacccctcacatcttgggatgcaactctagctgccctggaacctgagatgcagaacagactggccttgaacttgtggtgatcctcctgcttctgcctcctaaagagacctgtttactcctggtagctcaaaataactcacgtttgggataccatcatttatacgtttagacacacagacacacagacacagacacagacacacacacagacatacacatacagacacacacacacacacacacacaccccaactgcctaagaataaatgactccctctgccttctgccctttcttacatcccagcagtcacttaactttagatgcagatctctctttataacaactgatgatgtttgaggcctgtgactggagtcaaccctggatactgtgttcttctcctctgcttccaatgctgcattttaatgcagtcgtaacattcttttaatctattagtttttttttttttttttaaagcaacacttctcgcctccaagaaaatgagtccttaagggcaattaaggacttggtgtaatttctccttgaactgctcttcataggtactgcgtgggaacaagctgacctctagtttctcaaaggaacaggcgtcctttgggaggtggaatcaagagaaaaacacagaccatagaagttcaataggaggaatgttggagagtaacatccttcagggagctggggaagtagctcagacaacaaagggcaagcatgcacgcatgcacgcaggagaaaccgggtttgatccccagactctgagtttaaaaaaaaaaaagaaagaaaagaaaagaaaagaagagaagagaagagaaagagaaaggaaaggaaaggaaaggaaagaaaagaaaagaaaagaaaagaaaagaaaagaaaagaaaagaaaaaaaaaaagaaaaggaaaggaaagaaaagaaaagaagaaaaattgcatttggtgtgcacttgtaatcccagaactggggaagcagagacaggaagatccctggagcagatccctggggcttgctggcctgcatcctagcctagtcagtaagctataggccaatgagagaccctgcctaatcaagaaacaaggtgggttgctcctgaggagagatacctgatattgtcttctggattccacaagcagacactcgcacatgcacacacaaacacacaacaacaacaacaacaacacacagatacatacacacagagttgcacaaacaacaacacatacacagacacacactgggaacaaggaggctgattaggattcaacagagaagaagatgctaaatatttactgctgatcctaaagatttaagccaggtagtgagatcctctgatcttagctgcttgggaggctgagacaggaggatgtcaaatttaaaatttaaggcaaacctgagtcacttagctagacccaaattatctaaaaataaaaagtaaatggcaaaggtctgggatatattcttgtggtagagcctgtccctgacatgcaagaggcttgtggttgaatcctgaggaccgaaaacaaaacagagattttactctgattgagagagtcaaactactctttgaaaaaacaaaataaaacaaaaaacacaacacacacaaaatccaacaacagcaacaaaatcaaaagtttagatgaacctcacctttttgtctttgacaaggtgttggtgagagactggaaagctcccagaaagaacaatgtgtttgacggaaagatgcaaggccatgtaagagaggctgggggaagcttctgctttattttataatgaagactatagcggtcattttgtaagcgagcacatatgtacaatgaatacatatttatataaactaacctttcattcattcccgaaatacaagaaagttagagcatttgaaaatggaggttttttttttttctttctcttccctcctcagattagcccttcacagctgctgaacagatgtctgatctcctctgatagacttaattgccttttttgtttgcacgaagcaaataaacatgatggtagggtgcatgtgcgtgtgcgtgtgcgtgtgcgtgtgcgtgtgtgtgtgtgtgtgtgtaagagagagagagaggaaagagattcgggggagggggagggaaagagagaagcaggtgatgagactgaagacagaggaagaagaaaacaagacagaaagaagagtcacctggcagggtgcggcacagaccacagtatccaatcatagaggatcagctggggacccttccctagcagatctcagtgcagggcgtggtcattggaactcatgtgctccgtgcttaccactgagaggtgacatgggactctgatgaagactgatggtcaactgtgtaacttatcctttttcttactgtaaccagtcccccccccgcccccctccccaagatgcaactcaaaggaggaagggtgatttgggttagagttcaagaagttagagttcaacctggtggggaaaggcaaggtggcagaaagatgaggtgacggacacattgtgtcttcattcagaaatcagagaggatcatgaagtgcggggctgagagacttcaggtctgccctggtggctgacttcttccagttaggccctacctcacacccggtcctcagcaggaagtgtagggtgctgacctgtgagtcttggttacaggaccttgcacactcaaactgcagcagtggattgacgggaaggaaagaggttccaatggacaatggatgggtgggaatgtcagttgttggctcattctaacgtcatttatcttcaggttctctcagtggccaagcagatttctgtccttgtgctgtatccattcgaaaatgtgacaggaacgaaatatcccgtagggtgtggcttataaacagcaggaatgtattttctaggttcttgagcctggaatgccagggtcaagtgctgatagacttttagccccagccttctgtctgcatttgcacacagtagatggagtgggggtagggctcttttacaagggcattggttccactctggagtatactttcctcatagtctcatcttctaatgaccctacctccagatgccaccatcttggtgatcagattttaacctatgagggatacacacgttcacatcagcagatgagctttctgtgcaaggcttatcactgttatgaagtgcgagcccagctctttgtgatgggcacattgtgtgactattcccatatggaggaaagtgtaggaagaaagtaggatgcctttccataaataaattaaagcccaattacctattaaggactttgcctaagcactgatgggcagagagatgattctggcttgagactggttgacttaaaacaagaatcttatctaacgctgggagggtggtagggtagcacagtgggtgggtgcttttgggagggagcctggtcaaaggcccactgatgtatgaacatctgcgtacttgcaacagatgcattttggttactatagtctgttccctgatgtgtccggtgagcgctctggctgtccttcacacagcttgcttggggcttctcacagtctcccctgtgctctctctttccttccccactgagttttgttaggcgcattgaatgagactctttgaagaaaagacagatgtctctgattgcacaaatcaagggagtctgatattttttttagacaggttcaggttaggaagaaagaggaggcacgctacgaagagccagatctcaagtgtgtatatatacagcgtctctgtcgaaagtagggttctgtgctccaaaccaaggaatgacgtcagtcactgtgtgtgcccagtatcacaccatcgctggcaaagataaatggctttgtaagaaacagggacatggtgttagaaatgaaaattaagaacttcagtctttctgtttcaccctggcactttccatgcaggggagtctggtgcattctgatatttcagagggatgtagcagaggcagcttttcttgcattgtctgtgggtagaaatgcttctgccaggagagctatcagtattaagtgaaacctctttaattgctttcacttaaggtgcatgaggtaaccccacctttattgtggcttttatgcggttcttcagggattcactaaatctcctgagcattgtaaagagtcagcttccaaggtaactatccagtaactattatccactgaatgagccacggcccattcagtgacagggctcagagtgctctcggataatgatgggcccactgctttaccacagtcccggggctgagatgagaacacatgcgttattgtgagcagatctttaactttaagcctatgaactccagacatattgcttcctcaattctataccagaggggtgattaccggtcaaaggaggacagtttctaattagggcagaatttctcctgataaattttgttcttttcagatccaccagcatttgctgaaagagcaaaaaggaaaaaaaaaaaacactcttagggtttatctggcttttcacactactgaggctgagactaaggcccggggcttgtgtgaaggacacagacgtacggtgctagagagaatagcttctctgagattccccactggaccagtggggtgcttagcagcattctagtaagctcttaggagcagccagaggtagacaatagctcataggagcatgcacccagtatttgcttctgatgcttgtattgtaagttattagccacttatattagcacttccagttgaccgtgaaaaagagcctggctcagatgtgtgttcctcagaaaagcagggggacggtaaacatttaaaggcttgtttgggtaaagtcacaaacgctccgagaaaccactaccataaaagcattgcatactcagggcacacagccatttgcaattctgacctcgataagatagaacccagcagcttctgagctgccgacctgctctaagctttgtgcttagcccgtgcttcctaaaagaagcatagcaggaaatagtgaccgagtaggacttttgtagggagatgggttgaccatcttagacagaggagggtacgttctcctgtattgcgagcacaaccatttacaggttgtttgattgaatcaccagagaatggcagttctcacacactaatgggcaaatggattgatagcaaacacttccgtaatatgtgtgagctaattgcatttgctctgtggcccaggcagtaagtggacttaataggtaagctctcactttgtaacacctgcctgtgggtttttaatagtggagctggttagtgctcacatggtccgggtacaatctgagaatcattttgttggctaatctgcattaacgaggaggaaattgggtcttgaggaggtttgtaaccatcttccaaagatggtgagcagatccgctgtctggccaataattgtgcaaaatctaggatgcctcttggtattgagtttagctttcttctcctgtccctcctgtcttgtggtgtttactgttcttgacctgaaatccagcacccccacgccccacctcgctctctctgccttctctgtcagaagtctggccattcaccatcactgttggttttcaaccgcctcagtgatgaacttctactgttgtcttagcttgctgccaggattcagcaagatggaggtgtccgtaatgccatgctatatttcagactttccattctagaacagtggctctcaacttataggtttgacaaatcctttggacaaacctctatctttaaaaatgtttacattatgactcacaacagtagcaaaattacagtaatagagtagcaacaagataattttatagttgggggtcactacaacatgaggagcattagggagtctgagaaccgtaggatttgctttcatgagaagcagtagagaaagactcctgccatgtagcacggacctgccagcagtgtcctttagaaaggtcttctgagatttgtttgccttctaggttggtggctggtagggaggccttgcccacgcacacagaccatggctaggttggtctatgctcccttgttttgaggtcacgagccaaggacactttcttcctgttgtttgcttggtgagaatcattaggaaacatagagacctgcttcacgtgtctgagtgcctttgacttaggaaaagttaagctagccataggccttgttggtctccatgatgctctgggaatggctgtgagaaggttagctccccagagtctccaccttgtcttcagtaatgagaaaccaacctctcccacttgggtgcacccgggtttgcctgagctctgggctcctgatggaacttggtgtgtgcgcactggaagaggcttgctatgctggttgggttttcttgagttgggaggtcttgtgtaaaggtcacactggtccagagctctggctcctcctgcctcgtctcttggctgctggcagaattctctctagcttaggcaacagtccttagtcttgatctgtttcccatctcacacttaccacagtctgcatgcgttttacacgtgcctaggaatcaggactgtgttaggtctctgctgggtcttgagatgttgtgtgaggtcaaatttaacacttttgtgtgatctcatgaaagtacctgtgagggctggagagatggctcagcggttaagagcatagactgctcttccgaaggtcgtgagttcagatcccaggaaccacacggtggctcacaaccattcataatgcctttttctggtgtgtctgaagactgttacagtgaactgacatataataataagtaaatttttaaaaagaaagttttttaaataaataaataaaagttttttaaataaataaatgctacagaggtgtattttacagcgctgtattctcctgatataactggtgtattcctgcagctcctgtcccctctccaaccctcttccattactctctcttccagactgcacagaccgtcctggtggtcgttgtagtatttggcatatcctggctgccccatcatgtcgtccacctctgggctgagtttggagccttcccactgacgccagcttccttcttcttcagaatcaccgcccattgcctggcatacagcaactcctcagtgaaccccatcatatatgcctttctctcagaaaacttccggaaggcgtacaagcaagtgttcaagtgtcatgtttgcgatgaatctccacgcagtgaaactaaggaaaacaagagccggatggacaccccgccatccaccaactgcacccacgtgtgaaggtttgcgggagcctcccgacttccagctcccatgtgtgttagagagaggagggcggagcgaattatcaagtaacatggcagcttattctccacagcaattcctatcgatccaactacattccacagtggtaaaaggacgttgattgttcagggaactcgtgggtctactgaagatcattttccaatttcattttactctataattgtatatatgagacaaaagaaacttctgtatagtttctagctctcaaggaatgaaagtcctacagcactctgcaaatgttttgatctccatggtgtaaagtaagttctgtaaagcagagaataatatttgaaatccacattttcaggccagttaatatagggaaaaagttctttttaaaaaaaaatttgagaggagaggtaatagtctagtctgtgctttgaaatacaactgtgggcacagaatagtgatttttattttattgaacctttgtggaccggcacctcatctgagtcgtgggtgtccagaggtctgtctggggatgtgagacccatcaagtacatcctgggagatcagcgttgactctactacgaaacaatcctgtgagctgggagtttagggtgaactaagaaactccatggaagtctgccgaggactgctgcaaacctgtgtgtagctttaaggatgcttttggcaaatgcgttagctgcgtctccaaagaggagagacgtttgattcagaatgaacgaagacaaaagtatcctgtgggagaatagagacacacagagacatgctgcctcatgcagatttgtaccaacaaatgtctaaggattgttttccccaaatattattccatggagcaatgttaatttagaattaaaaccatcaccatgtgacttacaaatgtaactttcacaacaaatttcatatttacttatacttgccataggaaaatgctgtgaaattactaaattgtcctgtcttagaagaataatgtttaggtttaagactttgataatattttaggaggagggaaacaaagcaagacactttaaaaaaatcaaaaagggtgtatatctgtgccaaatcagcacctaatttaggttaaaaaatgtaatgtagacttctggctcgttaacttttctagctcatttattttcgtgactattcccctgtaaatagtgtttacatttgcaatagtctctggatggaaaaggggggactgttggaatcacggggaatgaagagttctcagtggctgctagggcgggatgtgtctgttggtgttattgggtattttaaagagaattataagccctttgcatggatttttgtttgtttgtttgcactttattcaatattggagcagaaatactttatcttgaaaaaggtacctcacgtgattaggggaacctaaagctgtccttgtggatgttggcatatgtccttcattcacactgtccacagaggcgcttggtcagacctgcatgtgagagagatatcctatgctctaagagttccttgttctcttctgctcagagactttgtagatggaaagccaacactgtggccccgaggcatggcttatctagaaggcacgtgttcatacacccataaggctgggtcttgcccagaaagcggcatctaatgtgacagtgtgtacttgtgaaccccaaatttgctaaacatccattcaaactgctcctgctcctgaaagacgcctctgtaaactgccattctgaccattttctcttcccttgtgcttgactgtatttctaaagtgacttagaatcccaactgtagccacttcctgggatgatgggagactgagagctctggaaggtgttcttatgacctggggcagatcagtcacgctgacgagtacagcaagagcccacacatgtgccaagcttcctttccctggtaagtgattaccgaggacagtttggaggcagtggatgatggtggatgatggtgaccggcggaagaaggaatgtgtgggcctttgaagcaggggcaggtggctgctttttagggtgttagaaagaaaattgatgtttttgtgactacaagcttttctgctgcagtcctctgaagcagctgctattttgtgggttctttgtttcatgcagagaaagatttggatatacttacataactggaatgtttgctgttgtgcacgcacgcacgcacgcacgcacgcacgcacgcacgcgctcgcgcatgcgcactcacccacacacgttcatccacgtatgtattgagccgtgcaggaacctgaggcccctttctgaatattagattcaaattattgttacttttaactaaattgttctatttacacatttcctgtctccctttgtccatcttttatcctcttgtctcagcttcctgcctctttgtacacagttagccccagctcccccagatatgacagggagcagagcgagcgggctgggttcatgagtcatgcagggcctggagcttatgattcagcttcaaatcaggatggaacggatcactgctctacccgcctctcaggtacacagaggtccagccgtgataatttcactctgctgactgaatccgcaggtcacgatgcagctgacaggagaggaccacccacctaagtacccacttccttccttacctaagactactgagcccctgagcaccccgtgcttgtgataaaaccacaggaacaatggggtgtgtggctgcatcatgctcttagctttaagggagttgcgacgtgcatatgtatacatcacaaagaatggggactggagcaatgcgtggatggggtcatccgcggaggaaactccgctatccagcgtgctccagttctcatccgtgcttctcatgttttcattttgtaagtgactgtctaaggaagtgagtcagatcctctgtcattcaagagttgcacgccaggtttcttcttgacgatgcgttaatgacttgtctagttaacacttcatttattatgttggccataggcagcaggtggcccacgagcctcaccgttactgattggctggcaattgtgaccagatctgggttaaagcgataccgtatctgaatgtttcccctgttggaagtgaaaaggttgagtaggaagaactgtttaaaaggctccccgtgttgtggatgcaagctgcttctgcgtaaggcatttcaagtcacacattagtcaagatgtcctattctcttgtgcacatgccatgtctctgattatacccggtggcttctcagtgtgacagggtcagatgcggctctgcagggctgaggtaatcctgtctatgtgctggtggcattcagaagcatcagccgtctgaacactgactccttcatggtcttgatggctggctgcgtcctgttcatcatattgctggccctgtgaacatcctgggctctcaggccctattctgggcacagtgacggtagtgtggccacatgagtgagtgaggagagcggggtgagctctgtggaaatgacgccatctagattttctgaatctacacagcagtggctggggctggcaggttgaacagatgtctcgtggagtatgggagtcagggcaaggacccctagttgactgagctttagactctgtaggcttctttgggataaagtcctactgcagtaccgcattttcaaagattagatactgatgattaaatagggcctcttaagcctgagaagctgcgcggcttcttctcgccctctgtcagctggttttgggttttgaaagaccactgctcagccacatggtgacaaaggaggagtgcctgcctgcctgaagttgtaggtaaccaacccttccattcagtgtcacggtagggccaccgaatacagttgaccatgtggccacctgccattgtgccctatgaaggaagagatttgctatagacagaaattagtgccaatcctggagcttccaggggaattccaaaaatcatgaacgcgggattcctcaggatccatggcgtagcgtgtgcaaagccttgctgaactgctcaggaaaccccgggtggaccccagggcttgcccttctgcggaggcttgaggctgcccttctgcggagctctctgtggtctgagatccatggggagacacactctctctctctctctctctctctctctctctctctctctgaagttgttgaacaagtagcttctacttcctcagtttagtagttgacttataattcaacctagcacagacatctatgaacgagaagggggctgcaaacccaagctacgtgctgctgtgaatttctcatctttcctcagtcactgcctcgaaaatgctctctccggctgttctctcagctttagccacatatactcaactgggtgtgttttgcctgtgtggagggatatcggaggctggccttgtcttccatgccttcatcatcaggattcttcttggctatcccagcaatacttagttttttttttttttttttttttttttttggtttttcgagacagggaatacttagtttttaaacagatccgtgtgagacatgtacatgtagacttcaggagcagactgtttctatcacagaccacgggtggttaatcaattctttcccatagtcagactgcgcaagagcaggccagacagggcagaaatggcagccctctaggctttgagagtgccatatgtctgagaactcatttctggtgtgttgtgttctgaagtgctgcgagtctgtggtggaggtgtgcgggcaaatgactgtagtctccactccagagcttgcttcttgggtcagccatggcctcctgggcaagcgctatcacactgtgctctggagagcccagaattctctgcccatcgccggatccacctctataaggacactttagccggtgaccgagttcccagagtccctgtcataatcttcttgtagtgccataatacaagatgagctgtagatgtctaggctccatgaggtacctgacgaccttgaggaaggactgagtcagggtgaacttgttatggaacttgccatctaaggtgttgcgggtgaaagaaagactgcagttacaaatgttgaattggataatagtgtgagagccacccagtgttgcctatgagagtgtttgattgactgaaggcaagaggttggtttttcttttttttttttttttctttttgtttccagagaacgaagcttatatgggtgcagcaaagaaaagggtttgcatgaacaggcttggggccaggcagtggcacacaagcttctcatgtgcttgtgctttggttctctcaagttcacttcattcagcaaggaactgtctcctgacttgtgtgaggtgagtgagcagaggccaggtgtgggatcctctttaaaacagagctaaaagattaatggcaacaccttccgaaataaaggccagtgataccacagacataccaggaagctataaatgggtatgtgagtgctatttcccatgttttacttttccagggttccatcctacattctcctttcacggggagactggaaagctgacagaaggggcaggcattcccattctgcatctgttgctgaacagctctgtgcatttctcaggttctgtgtgcctgagctgtgagagccgtgtgcactgcagagagagcagtgtgtgtgtgtgtgtgtgtgtgtgtgtgtgtgtgtgtgtatgtatgtgtgtttgtgtgtgtgtgaactccatttgggtctaaatttcctttgcaagttattctttggggatggtattctcattgtctgtagaggagggttctggaaaagatatttcagacttggaataatttaggaagtccaaataggcctgttccccttccctgggggcagagggtctccagtttcacgtgggagctgaagaactcagagtgtgggtccttccagctttaccctgtgggataagcaacctacagcattttttttttttgtggttcatgctggtggtctgaagtcacagttagaaagccacttcatggcttacaggagggtaaagggggcacttgggcctgtggttcaaggcttctatgtgtctagggtttagaaccatgagttgccacaggattgaaatcactgggaatttctttctttctttctttctttctttctttctttctttctttctttctttctttctttctttctttctttctttcttttttcttgagacagggtttctctgtatagccctggctgtcctagaactcactttgtagaccaggttggcctctaactcagaaatccgcctgcctctggagtgctgggattaaaggcgtgcgccactacgccttgctcactgggaatttctaccatttgcattggtcagactctatgcccattgagctgctggcattgaggtagccccagaaacacagggtctccagagccttagggactgcaggaacttgacagcctttcttctaattaaggacttcatggcccttttactccccatcccaacacaaaagcttaaagtgatgttcacagtcgttacataaggagttttgaaatcaatgtcttaactcactgttaattaagtatgagcatgtctttgcctctattattatctccaagagataaatataatattgcttgtagttctctatacttaaagcttttggttaaatatgtagtaaaagtaaagaaaaaaaatgtatgtatgctctaacttgcgtcttcctgatgatattgcctaaatgctgctattaaacagtggtgtgagttgcctggtgcctgatgctcttgtccttgttccttaaggaattgtcagtcaaatgtatctcatagtgacaaactctagcaggaatgccaataaacttataaagcaaaaataccaaaaatgcagagtctgcattcacgcgctttaagccaaaccaagcccatccgaattcacctcacgcttgtgttctgcatggaatctacactgtgatttgaaccaatttcctttaagtgaaaataaaatttgttctttgaagtgttctcattggagtgtactctctccctgcaactagattgaggttgtgtcatttcttttaaagtttgagaacacaatgaaaagttgttgaagagggttgacttcattagtaccggatgctccgcttgaagcagaacaaatcgtggccgtggaaagccgactcccgtgtctgtaaagatctccttagtttcctcttttgtctttattacttatccttctttatttttacttttgttttcctcttttaaaaactatttttattatttttaattatgtgtatttggctgtgtgggcttatgtgtatgtgtgtgtgtgtgtgtgtgtgtgtgtgtgtgtgtgtgcatgtaggtgttcatggatctccctcattggctatgcagaaagagatgggagcaaaagatgtcattatattttaatttaaaaagttactacaaaaaaaaacagtgctttttccaactcttcttttccctccttcagtttttattttgatcattatttttctattttaggaaaaattacttttcattataaccttagctgtgtacagagatactgatagactgcttgtcaatagatattgactgagagcttgcataggattcataaacataaggcagagagctaactgggaatggggtgggcttttgaaaccttaaaacccataccctagtgacacgtctactccaaaaaggccacatctcctaattcttcctaaagtgtccaccaactggggaccaagaattcaaccatgtaagcctatgggaggcattctcattcaacatatcgtaaacttaaggaagaaagggtttattttggtttacagttacggagggctcgagtcactcacgatggggaagacaaggggacaggcaaggaaggggtcatgggggaagcaggaagctggctgattactctgcatctttacttaggatgggaataaggatggcaagaggcatcagggagcagctctcaaacctggaggacatacgtcttccacttaggccctacctcctgaaggtcccagaacccttctaaacagtgataccaactgaggactaaattcaaacacatgagcctatagggtaaatttcatattgaaaccccatgacccccatgtgagagactgacggataatatgctgattctatttaaaactgtatgaggcacttcatatccatgctccattaaagtgaaagggatattagtgaccactgagcgtggctacttccaaacttttggaaataagtacgttttccacataaatcacaccacaattacatctaggactaattgtccttttcgtatggaccaatggataaaaagggaaaatggggttgttgaccacgagttctcatgaaagtaaaatgtaacgggtcatattcagcaatgttttcttgacaatatccaagagtatgaacatcttgggtgtcttagtcagggtttctattcctgaacaaacatcatgaccaagaagcagttggggaggaaaggtttattcagcttacatttccacattgctgttcatcactaaaggaagtcaggactggaactcaaacaggtcagggagcaggagctgatgcagaggccatggagggatgttacttactggcttgcttcccctggcttgctcagcctgctctcttatagaaccaagactaccagcccagagatggtcccacccacaaggggcctttcccccttgatcactaattgagaaaatgccttacagctggatctcatggaggcatttcctcaactgaagctcctttctctgtgataactccagctgtatcaagttgacacaaaactagctagtacattgggcattttcaaaatcacacaagtcaactacatgagatgatagatatgtcaacttgtttaaggactatattcatcttaccatgtgtatgcatatcaagacaccatcttttaccccttaaatgtatacttgtactggctgattttgtgtgtcaacttgacacaagctggagttatcacagagaaaggagcctcccttgaggaaattcctccatgagatccagctgtaaggcatttcctcaattagtgatcaaggggggagggcccaggccattatgggtggtgctatccctgggctggtagtctttggttctacaagaaagcaagctgagcaagccaggggaagcaagccagtaagtaacatccctccatagcctctgcatcagctcctacttcccgacctgcttgagttccagtcctgacttcctttgatgatgaacaccaatgtggaagtgtaagccgaataaaccctttcctccccaacttgcttcttggtcttgatgttttgtgcagggatagaaaccctgactaagacaatactataacaacaacaacataccatatttcatgaccaagtaagtttcatttcaaggatacaagaatggatcaacctttaatgtcattcaatttatccaccgtatcattagtctactaaaacatggtaatcaatgtagatgataggttggacagatccaacagccaatcatgatgacaaaaggaaatgcctggatttgacagatagcatcaaaactcaaccaaccaaccaaacccaacaaaacacccgcccccccaccacccatagctcttatcatagtcagtaacaaaatattggatattttcccctctatccaaggaaaatggcaaagatataataaaaagggtttcctatcaacataactgtgataatttctagccactgcagtagaaaaaagaaaaaaatgaagtaaaaaacagataaaaggggaaggactgaattttctttgtttgcaactgacagcattgcctagggagaaattctctgaaacccacaatgaaaactccttaaatgttaaatgatatcagcaagatcatagcataaagggtcaatacacagaatatatatagaatatgaaacaaaacaaaaatcactacaatcaattacctttagcatagtcacaatataaatattgagatatattcattattctaaaatgttacttcaaatatgcatggaaatgtcagagctactacctcaacttggaagaatcgtttgcagccctgaagcaggatgcttggtcatgagatgcaggggctgagacagcacatctactgtcttcatcccactggtttaaggtcgctgagctcaactctatcttgaggtcagtgatgcttcttatccccaactgctccacacaaagtcttcaatctcatgtctgtaatgctcaaacaggttgcacgctctcaaatatttctcttctacttcctgtcattattttgtttaatgagaagaaatgccctattatccattgccaagtcctgcttggccatatggaagagatggtacaacgtggttggtttcctgtccttggaacagagccaacagggtgtgggtctctaggagtgttgacggttgctgggcgtgaggcatatatatatatatatatatatatatatatatatatatatatttacttcatgttcctccttcaggaaatattctccctgccaaggttattgggaatgtcctctctgccaaggttaatggctccatgataatcagagtcagcatgaatccaggaggtgaggatgtgtctaaagtttcagcaaaatggtgaacactgagacctttgggccatccttaaggctgtgggaaggaactctgtaaacgtgagtttaaaaataatgtaagttctctatgcaaaatataaggctgcaatattgaattatatgaagagtttcatggacctagaagagcagaggcagctgcactgtgagccaccttgtcagaaaggtacaggcagattcctgagttcaaggtcagtcagggacaggggtagactaggctcaatcatggtaggaatgttgatcttagagggagatcccacccagctaggttattgtctgtgcttactaaggcaggcagatctctgaacgcattcacaatgttaaaaaatgtgcttgctgtctttttctgagaatcaagaggctagagtcatgggatgtcgattcaaaggataataaaaagggaacgtggagtaatgactgaatagtatgtaaataaaagactgggctgttgatctgcaaaagatgagctattcagagagtttctcctttgggagttttaagagccctgaggggagaggaggaggaggaggaggaggaggaggaggaggaggaggaggagagagagagagagagagagagagagagagagagagtccgagcggtcgctatcaggaaagctgtcttgagcagaacatagaccatcagcttgtaccccatgatttgactttgagtctttttttttttttgccaccctcaaacatcccttctctcaaggaacccctctccaagctgaggctggtccttgccaatacattagcataatgcagaagttttatgatttttctctttagttatataagattgtggcccataaaagttgttatcaactgtcaagacaattaaaaaataaattaaaaattactgtaatcatgtttgtaatgaatagcattagtagaaagtttgtgattctttgagatgcctcagtgattaaaatcattcactgattttacagatggcctgagtttggttcctagcacccacgttgagtgcttacaaccacctataattccagaggacaagaggcacctgcacacaatgcacatattaatgtatgcgtacatacatatacatgagcaaattaaatttaaaaaggtgttttctaaattcatcttcatttagtattggagaaaaaaaatctagccttagtttttttttttgtttgttttttgttttgttttgttttgttttgttttgtttttttagagctggtagctctaaggaagtcatcagccacccatcctcaaaagctgaattaaacaggcaaattataacgacaccataacacaggagaattagtcacattgggaagagggacaaagaggtctagtgacactcaagtctgtctttgggatcccgacgctagggtgagccttaactagagagcaggaggaccaacagaggggcagttctggcagacgtgtgctcctgcccaccacgggccatggtcaactctagtttcttctgaaagatgacctaacacgatgccagaacaatgtaaaatcatttcctagcagacaagtctcttctctctctggactcagggctctagcctttcccctcttccattatgagattcctgtggaaatcccagttctttgatagcatacttttcagtagtttgatggccaaagtgagagatcaagggtcattcctttcaggaaggttacactaatggcattttgaagcctttaaccacgtgggctgaagggttgaaattccatatgtgggccacccaccagcaaatctgtaggtagcgaggcatatgttctctgtcccagactcctagccacacactctcaacataatggctcctgcccgttctctctgtcttacatcaggtgtctgtgtcagctgcatccatgagaatgccaccaggttcttctgatgggctgtcgtcctacataagggatacatacatacagagatgcacccgcctgctgtgggttcagggcagagaggctgtctttagtaaaataaatacaaatctgtgattattttttatataaatagagctcttctgaggagtattgacacttttttttttaaggaacattctcattttgcaagcttaaattggcattaaaaaatgtattcaccattgctctctccagacacaccagaagagggcatcagaccccattgcaaatggttgtgagccatcaaaatggattcaccagtatcctggtacacctgcgcagctctcaagatgtttgtggcttatatgaggaagtcaggtgcaagtcatacgacttagctgcagtccctgatgggctgtcgtcctacataagggatacatacatacagagatgcacccgcctgctgtgggttcagggcagagaggctgtctttagtaaaataaatacaaatctgtgactattttttatataaatagagctcttctgaggagtattgacacttttttttaaggaacattctcattttgcaagcttaaattggcattaaaaaatgtattcaccattgctctctccagacacaccagacactgccgccacacccgctccccacacatgtggttgctgggaattgaactcaagatctctagaagagcagtcagtgttcttaaccactgagccatctctccagcccttaagttgtcattcttaaaggtactcaggatttttatgctattgtgtaaaatatgatttgaacatgtttggcctataggactaatggtgagaggagaaagttcttgatacaaaattgcaataaaagtcttattatatgcatgtgagtggtttgctaacttttgaagtcaagtgtaaccacaagatgtgacggattgcctcttatccagagggagtttgtgacacatttctcctaagaagagatgagaaaatgaatgaaattcctggggttcatttctgcatttcctgcatttgttacacggactatatagaatataggtacactgatgtctgtgtatatcttaagattaattatctgtctcttaagctcttgctctcttcttgtctcttacctcctgctctccttctccccctcccttctctctttccacatttcccttcccttcccttcccttcccttcccttnnnnnnnnnnnnnnnnnnnnnnnnnnnnnnnnnnnnnnnnnnnnnnnnnnnnnnnnnnnnnnnnnnnnnnnnnnnnnnnnnnnnnnnnnnnnnnnnnnnnnnnnnnnnnnnnnnnnnnnnnnnnnnnnnnnnnnnnnnnnnnnnnnnnnnnnnnnnnnnnnnnnnnnnnnnnnnnnnnnnnnnnnnnnnnnnnnnnnnnnnnnnnnnnnnnnnnnnnnnnnnnnnnnnnnnnnnnnnnnnnnnnnnnnnnnnnnnnnnnnnnnnnnnnnnnnnnnnnnnnnnnnnnnnnnnnnnnnnnnnnnnnnnnnnnnnnnnnnnnnnnnnnnnnnnnnnnnnnnnnnnnnnnnnnnnnnnnnnnnnnnnnnnnnnnnnnnnnnnnnnnnnnnnnnnnnnnnnnnnnnnnnnnnnnnnnnnnnnnnnnnnnnnnnnnnnnnnnnnnnnnnnnnnnnnnnnnnnnnnnnnnnnnnnnnnnnnnnnnnnnnnnnnnnnnnnnnnnnnnnnnnnnnnnnnnnnnnnnnnnnctctctctctctctctctctctctctctctctctctctctctctctctctgcctttctacaataaagctctaaaaccatgaaaaagaaaagactatctgaaggattgatgaactaatatataggatttgggacaagatcttatatatctcacaattcaaggtacacctacctcaccatggtggccacactggtttgcatggcactagcctccataggctcaggtatttgaatgtttgttccccatgtgggggactctttagggaggatagggggtgtggtgttggaagaggtgtgtcactgtgagtgggctttgaggtttgtgtcattgtgagtgaggtttcaaaagcccacaccattcccagttagctctttgggacaacatattttcctacaacttcctttcttttattgggtaattttttcataaatacaacttagcaaagatgacactgcctgatggcttgtgctacaaaactagaaggttctgaaagagagtccttgatgcatttagatcatcaaccacaatttccaagcatttgcacacactgtgtcaagctctagcattgcatgcaccatgttaagctcgagcaatgcatgcaccatgttaagctctagcattgcatgcaccgggtcatgttctagcactgcatgcaccgtgtccagctccagcaggaccagtctgaatgtaatacctgattcttgtccccagtgaatggaacaagcaagctgcctgtgatacatttagccgatggcatcctcagcatatttggctttgaaaaacgtaatgaatcttctttctccctcaaccaaaagcataattactatgcagtttgtctcagtcacaggaaaataataagagcataggccatagtttgacctgactcttcaaagaatatgagttcagtacacaaagtgtggcaaagccttgtgagatggcaggacacagacatgacttctgaaatgggttctatcacctttacttacacagcttgagaaaatagaaaccaaagctgcagatagatgtgttaatatagatggctgaggcaaggaatttgctttcagtcaatccagaagatgctccagtgcttggaggcctctgagaattctgaaaggttttttcttttttaaaaatgtacccatccattaagagtatccattgaaaaaagtagaagataaaataaataattggacctaaattctaaaaactccttcctcctccttagcaagaatgattggaaacaagcttttgtcttgtttttctacctgtgaaaattaaccagatttacagcagtctagagagggtttagtgagacaaaaaaaccaagccaagccaaaccaaaccaaaaaaccaaattttaggaatcagaacagagaggcttatagaatttattcactggggaccctctgcttccttaacaagacatctctgaaaactgatagctcatgttgtagggaccagagggagcagggcagggatttagctgtcttgtagcctgtcctcatctttccccattgtagtgacaaaagccacttaaggaaagaagagtttgttctgtctcacagttgaaggtacaccacaccaaggtgggtgtaatggtctgaatgagattagtccccataggctcatacatttgaatgattgtcccactggattgtttaggaaggagtaggtgtggccttgttggaggaggtgtgtcattgggaggggactttgaggtttcaaaagcctatgtcatttccagttagctctttctgcatgtaactcatggatcaacatgagctctcagctagtactacagagctatgtcaccttgttgccctgctccctgccatgatggtcatagactagtcctctgcaactgtaagcaagccttcaagtaaatgccttcttctataagctgccacgttcatgctgtctcttcacagcaacagaacagtcactaagacagtggacaaggagcttcgagcagctgctcaccttgaatcctctgtcaagacgcaggagctaggaatgctttcacgttgacctcctgtgaactccagccctaaatgctgctccctggagagcatttgcgaaatg

SEQ ID NO: 739 - DNA, 1904 bp, Mus musculus
cctagacccgtacctctgtgttctggagcctgccgcccccgcacgggaaaggcttagctcgggacttgcagcaccgcctcctctttagccaggccaggcacgaggatagtgtgatcgggcacagccagggtcgctcttccaggctttcttgcgggttgcgggaggtactagttggagacgcgcgcgctcgctctcgccgctctgtcctgggccactccgtgatcctaggctacctccagagccagttttccctggctggcacaactctccagggcgctccggtccgttgcacagcgccccaagggggtatcccagtaagtgatggaactggctatggtgaacctcagtgaagggaatgggagcgacccagagccgccagccccggagtccaggccgctcttcggcattggcgtggagaacttcattacgctggtagtgtttggcctgattttcgcgatgggcgtgctgggcaacagcctggtgatcaccgtgctggcgcgcagcaaaccaggcaagccgcgcagcaccaccaacctgtttatcctcaatctgagcatcgcagacctggcctacctgctcttctgcatcccttttcaggccaccgtgtatgcactgcccacctgggtgctgggcgccttcatctgcaagtttatacactacttcttcaccgtgtccatgctggtgagcatcttcaccctggccgcgatgtctgtggatcgctacgtggccattgtgcactcgcggcgctcctcctccctcagggtgtcccgcaacgcactgctgggcgtgggcttcatctgggcgctgtccatcgccatggcctcgccggtggcctaccaccagcgtcttttccatcgggacagcaaccagaccttctgctgggagcagtggcccaacaagctccacaagaaggcttacgtggtgtgcactttcgtctttgggtaccttctgcccttactgctcatctgcttttgctatgccaaggtccttaatcatctgcataaaaagctgaaaaacatgtcaaaaaagtctgaagcatccaagaaaaagactgcacagaccgtcctggtggtcgttgtagtatttggcatatcctggctgccccatcatgtcgtccacctctgggctgagtttggagccttcccactgacgccagcttccttcttcttcagaatcaccgcccattgcctggcatacagcaactcctcagtgaaccccatcatatatgcctttctctcagaaaacttccggaaggcgtacaagcaagtgttcaagtgtcatgtttgcgatgaatctccacgcagtgaaactaaggaaaacaagagccggatggacaccccgccatccaccaactgcacccacgtgtgaaggtttgcgggagcctcccgacttccagctcccatgtgtgttagagagaggagggcggagcgaattatcaagtaacatggcagcttattctccacagcaattcctatcgatccaactacattccacagtggtaaaaggacgttgattgttcagggaactcgtgggtctactgaagatcattttccaatttcattttactctataattgtatatatgagacaaaagaaacttctgtatagtttctagctctcaaggaatgaaagtcctacagcactctgcaaatgttttgatctccatggtgtaaagtaagttctgtaaagcagagaataatatttgaaatccacattttcaggccagttaatatagggaaaaagttctttttaaaaaaaaatttgagaggagaggtaatagtctagtctgtgctttgaaatacaactgtgggcacagaatagtgatttttattttattgaacctttgtggaccggcacctcatctgagtcgtgggtgtccagaggtctgtctggggatgtgagacc

SEQ ID NO: 740 - protein, 346 aa, Mus musculus
MELAMVNLSEGNGSDPEPPAPESRPLFGIGVENFITLVVFGLIFAMGVLGNSLVITVLARSKPGKPRSTTNLFILNLSIADLAYLLFCIPFQATVYALPTWVLGAFICKFIHYFFTVSMLVSIFTLAAMSVDRYVAIVHSRRSSSLRVSRNALLGVGFIWALSIAMDVAYHQRLFHRDSNQTFCWEQWPNKLHKKAYVVCTFVFGYLLPLLLICFCYAKVLNHLHKKLKNMSKKSEASKKKTAQTVLVVVVVFGISWLPHHVVHLWAEFGAFPLTPASFFFRITAHCLAYSNSSVNPIIYAFLSENFRKAYKQVFKCHVCDESPRSETKENKSRMDTPPSTNCTHV

SEQ ID NO: 741 - DNA, 2115 bp, Mus musculus
ggatccgtgagagaggctcgccctgcagaggacccgggactaagagggagccgcagcgccagcgccagcgaggcagggaggtggatcttagtgcgggaagctcagcgaccctcttcaccattgaaggtgtgcatcgctgggctctgcggagcttggcgggaagaagaggctcaaagcaacaggtgcaacctcaaggcactgaaagcaaggggacgcagctcacaagggccaagggattgaacccataaccgctcagaagattctccgcctgcggagagctgcggaggagtcccacccgtccagcttgctgactgcgagcagtgagagtcgcctagacccgtacctctgtgttctggagcctgccgcccccgcacgggaaaggcttagctcgggacttgcagcaccgcctcctctttagccaggccaggcacgaggatagtgtgatcgggcacagccagggtcgctcttccaggctttcttgcgggttgcgggaggtactagttggagacgcgcgcgctcgctctcgccgctctgtcctgggccactccgtgatcctaggctacctccagagccagttttccctggctggcacaactctccagggcgctccggtccgttgcacagcgccccaagggggtatcccagtaagtgatggaactggctatggtgaacctcagtgaagggaatgggagcgacccagagccgccagccccggagtccaggccgctcttcggcattggcgtggagaacttcattacgctggtagtgtttggcctgattttcgcgatgggcgtgctgggcaacagcctggtgatcaccgtgctggcgcgcagcaaaccaggcaagccgcgcagcaccaccaacctgtttatcctcaatctgagcatcgcagacctggcctacctgctcttctgcatcccttttcaggccaccgtgtatgcactgcccacctgggtgctgggcgccttcatctgcaagtttatacactacttcttcaccgtgtccatgctggtgagcatcttcaccctggccgcgatgtctgtggatcgctacgtggccattgtgcactcgcggcgctcctcctccctcagggtgtcccgcaacgcactgctgggcgtgggcttcatctgggcgctgtccatcgccatggcctcgccggtggcctaccaccagcgtcttttccatcgggacagcaaccagaccttctgctgggagcagtggcccaacaagctccacaagaaggcttacgtggtgtgcactttcgtctttgggtaccttctgcccttactgctcatctgcttttgctatgccaaggtccttaatcatctgcataaaaagctgaaaaacatgtcaaaaaagtctgaagcatccaagaaaaagactgcacagaccgtcctggtggtcgttgtagtatttggcatatcctggctgccccatcatgtcgtccacctctgggctgagtttggagccttcccactgacgccagcttccttcttcttcagaatcaccgcccattgcctggcatacagcaactcctcagtgaaccccatcatatatgcctttctctcagaaaacttccggaaggcgtacaagcaagtgttcaagtgtcatgtttgcgatgaatctccacgcagtgaaactaaggaaaacaagagccggatggacaccccgccatccaccaactgcacccacgtgtgaaggtttgcgggagcctcccgacttccagctcccatgtgtgttagagagaggagggcggagcgaattatcaagtaacatggcagcttattctccacagcaattcctatcgatccaactacattccacagtggtaaaaggacgttgattgttcagggaactcgtgggtctactgaagatcattttccaatttcattttactctataattgtatatatgagacaaaagaaacttctgtatagtttctagctctcaaggaatgaaagtcctacagcactctgcaaatgttttgatttgagacagggtttctctgtatagccctggctgtcctagaactcactttgtagaccaggttggcctctaactcagaaatccgcctgcctctggagtgctgggattaaaggcgtgcgccactacgcc

SEQ ID NO: 742 - protein, 346 aa, Mus musculus; identical to SEQ ID NO: 740

SEQ ID NO: 743 - DNA, 40318 bp, Homo sapiens
ttttggtgaggccaaagttggatgtattagtcatctgaaactgctgggagtaaaatgtatacagcaaaacaatagatgggaactatattttaaaactcaacagatggctggccatgaggttctcaccttaaatttgtcagaaaaccgtctcactgtagtctttgtaagttattattctattttatttgattgagatgggttcttctctgttgctcaggcgggagtacagtgacatgatcatagctcactgcagcctccaactcctggggtcaaatgatcctcccacctcatcctcccaggtagctggggccacaggcacgcaccaccatgcttggctaatttttgtattttttgtagagatgggggtctcaccatgtttcctaggttaactcattctttacatctattctgtagtttaagaaaataaaacctggagtgcagtggtgtgatctcggctcactacaacctccgcctcctgggttcaagcgattttcccacctcagcttcccaagtagctgggattacaggcacccaccatcatgcctggctaattttttgtatttttggtagagacggggttttgccatgtttgccaggctagtcttgaactcctgacctcagctgaactgcccaccttggcctcccaaagtgctggaattacaggcctgagccaccacgcccagcccccttctagttattttgatgcaaaacttagaaatggaatagagggataggtaggaaataaacttataaatagacttggatagatgaaatcgataactcctttaaatattggaatccaaatggactttaaagaagggaaataagaagtcaaatgtgttgttcagaatggacaagttccagtattatattgacatataaaacatcagctatgtaagtggaagataggccatttcttcagcttaattagccagaaaacatttacgagctgcagtaggtgacaagccgcgtgggattatccataatgtgctgaataatgtaagccagacccccacctctaggatttattagtagtcagaagttaggaaccagttcacgaaagacactcccagctgctccagttcttacaagcatacttcagtgggttttgaggagattgatgaggagcttccggagggcagccctcgttattcagagatgccctgtttctgttttacacagcttttgtgttaggggacacagtccctttctgggaatgcagaggactctaattgtaaggcccctgctttctgcatcttcgattttcttgcagcatccccacccccaaacacacactgacctgcattttatggaaggtgtgtaaatgcagctttcttgaagcactgaagaacttttgaagatctgccactctgtagacttccgattcatgcacctttttgtgcatttatcatgcaagtgagtaagatatgcttgtttaggaaaagctgcacagggtaatcctttcttagtggaaatttcctacatttcatgcgtagaggaaggaattgtattatgatttaaatttaagtctattcctttgatgattgaatgaatgaatggaatgagttaatacagaaaaaatctttaaagcaatgacctctctcaaatgcatgaccccttactattctttaaactttattttcttagtgacgttaagggaaacagtgattaccttaaatctaagtaagaagaaactgggtatggtacctcacacctgtaatcccagcactttgggaggcccagggaggtgaattgcttaaacccaggaattcgagaccagcctaggtaacatggtgaaacccgtctctacaaaaaatacaaaaattaggctggcatcgtggtgaacacctgtggtcccagctacatgggaggctgaagtgggaggatggttgagcccaggaggtagaggttggagattgcagtgagctgagattgaaccactgcactccagcctggatgacagagaaagactctgtctcaaaaataaataaataaataagcaaagagataaaaaattaaaatatttaaagtattaaatctggaaaatagaccagaagtatctggtttcaagtacctatttaatttttatcattttgcattcttttttctttcctatgtattttatttctcaaattgagcacaaataaatagctaagatgcattatgtatatttctcatgaagcagtgctacatcaggccttttgttggttgcagaaacttaactaaaatgcacttgtgaagagcaggagcttatctcatgacactggcaagtctaggcggggcactggcttcaggcacagctggatccagcagatatagtgacatcctctgggcttcttgatttccatttttcacttggcttccctccacatgattggtggcctcaaggggcctacttcacacagtgacaaaagcagccgccaacaattctaactttttgtagatgtggcagtttggaatatcaggggaagattaacctgtggggtatttggattggctaggcctgggtagatgctgatttctaaagctaagatgcattatgtatatacaatatgtatatattgtatatgatgaagcagtgctacatcaggcctttttttggttgcagaaatttaactaaagttcacttgtgaagagcgggaggttattatctcatgggactggcatgagataatattctagtcccatgagatatgcccctccaccccatgagtagggggacatctggggatgaatctgctttaccatagaatggtgaaacaatgtttctcgaaggtagggatgctggacagataaatatgtacttgcttcaggtattttctacacagggaatgaatctccatgaatttgtttcagaggataccatctctcactatactttgactgacataggtatatactaaatattctacaacagtataaagattaagaatattgtatgtggattgaaattgatccagctttaaatcccatcaccacaaacaaaaatgtgcatgagtcctaaggttggtttaacctttccaagacttggctgtttgcttgtaaaatggtgaaaataacaccaactttatagagttgttatgagaattcaaagagatagtgaacatatttcctacagtatagcacataagacactctttcaaaattattgctaattattaatgacttggttaatgctggtttattactattcattcattagcatgctcacatgctagcttaggatgcaaagatgaggaatgtgtctgctgtgtttcagagtatggaggtggttaaatgaatgtggccagataatactttaaatgcttccttttccattttgttctagatattttatttctgttctacaccctgtatatcactaaaacctaactattagacaggattatgtccctcagggggaaaattacaacagtccccaatgccagaggtaggggtaagggaatggcgtccaacttctgctgtgagttccaaaacctgctgtttaaagctacagagagagagtggccttgctggaacagtggtccctgtgtggagcctggaacatcctagagacccgagagtggggaggggtgcagcggacaccgaggctggtgcttgtgccgtacccttggggctggatgcagggcaggagggcccagcagggactggctgggaagccagggggctgggtcagtggcagaggggatggtggccccctgcccccacaaatccccaggagtttgtgactccagcagtgcctgtgcagctgccctcagaccccaggagtgtgcttcatccacccagtgggctgcctgcatctccaaggtgaccggagcagccaggtccccaggctggccctgcccctgttgtcacagacacacagggcccatgggcaagcagggaggatgccgatggcatccatccccaaaagtccttccctggccagtgcctggctgtgtggaagacctccagagacccagagcagctgcctggagccgaccccaatgtgctctggagagactcccgggttaaaggactgcgagatgcttgcccgcgacatgcgaagttacaaagcattgtgagggtgctttgggaagccaggacagagttttctgcgagtatagagggaggagtgatgcgccctaacagggacagccaaaaagactctggaaatgagataacattgcagctgggacttgaacgatgagtcaaaacatcctaggtgtaatacaatgaaaattgacattcagataggtggtctgtctgtcatgtaggaagaaaaaaaaattaaggaagagcagagtatgttaggacgcttactaagagtccacttggctggaacagctatggggagggttcttccatgtggcttggaagcttctctttcttttctatttgattggacataactgattctgcagacctgcaaaacatcaatggggctgagaagtgcagtcttccaggagcctggaaggggagaactgaaaatgtggtgaacacacataacatctgtcacagattattattattattttttagagatgaggtcttactctctcacctaggctggaatgcagtggtatgatcatagcttactgcagcctccaactcctgggctcaagcaatccttctgcctcagcttctcaagtagctggactatagcaggtgccagcatgaccagctaatgttatttttatttttattgtagaaatgggattttgctttgttgcccaggctggtctcaaactcctagcttcaagcaattctccctctttggcctcccaaagtgataagattatagacatgagccactgtgccttgctgagttttaaaatttccattaggagagactaggtcgtcttgaattcaactctaagagaattggaataagacagaataagacagataattgagacccttgtaaaaatgcaggatccttgaaaggctacactgttagtgaaggattcacctataaaaagtttcctggcaaagaagtgctgtagtcagcttttgctgcattaagctgcagtaacaagtagctcacagccacaaaggctaatttcttgctaaggggacattttaactggggtcaactgaaatcctgtggcacgtattcatggagaacacagcccaaagcagcagcctgcactgggatgcacagtcttcgtacctgagggggatgctcagtgttcgtacccgaggaatgaatcccatggtattgcttagaccttgagctcaggatgacctcacagctgttgcactcacattgtctcagccaaagcctgaaggaaatgggtaagactcatttctgccctgagaggagcacagaaattcacctgggagaggcaggattacagaatcttccaatagggagcgcagtaaatgagtgggaacaacaaagcaatctgcccacaaacacttctagaaaactccgtggcagccttagggccaggtgggagggaaagacctgagaattcactcccccattacctctcttatgtaggttttggggtttgaatttacccttgtgtgtcctgatgcatatcatgctgagaaattaacttaaaaatgtcctgagttgatggtaccattgggccaatggcagagcaaataaaaacacttttataggagtatgcacttaactcaagtctatcaaatcatcacaggtatgttctggcttaacagaaatctaaaggacaaaaacaaaacaaaacaaaactggaaacaagctacgagaataggaacttggtagaagtaataaaagcataattagactccaaggacttcagatattagaattttcagaatataaaatcagcacatttaaaatattcagataaataggagaggtaattagaaacatcagcaatgaggaagaaaatattaaaaaataggcctggcacatttgaaaaaattctgtgagaacttaaggagagtagttaaatcaagggtgtacagctgaagaaataccaataaattggcacagatgaagagatgaaaagtatgaaaaagtgagtcagtgataggaaggagatagtggaaaggcctaagctatgtctctcagaattccaggaggagagagtgccaagaatggggaaagtaaaagagataatggctgaaaatttttccagaactgatgaaaaatatattaatctttagcttcagaagctcaacaagaagggctaaaaaatgaaaatcatcacaaacctatcaaagtgaaattataaaacatcaatgataaagagaagatattagaaatagagaaaaaagtcagattatctctaaaggagtgacagaaagcacatcagctgatttctcaagagcaggagcaaaatccagaaggtggaaaaatatcctcagtgtactgggagaaaagaactgtccatctggccaactcccattcaataataagagccaatgagcaatttttatcattgactatcactaaaggaaaacttaaaatatattctctaaaaacaaggaaaaggcttaagatgaatagaggaaggtgcagaaagccatgggtaagaatgtgggtcaccaaactggatattgcctgtatcacacaacaaatatgccgaattggggggaaattaaaagaactaaacaactgggcaacaaaaccaggtagaatgacaaaaagtgactggagttagaaggcttcctgaaacttgtatggcttgggagaaggggagtgataacaattaattttaaattctatttaatattaatagaattttagtaacttctgaatccatgtctccagctctggtctctctcattaactcaagactaatccacccaactgcagtcttgtcagtcccatgtctagcaagcacctaaaatttaacttgatgctccacacctccaaacctgttccttccactctttgtgtcaactcagtaaatggtgatttcccatccaggctgtcagactaaaactgtggtagtcaaccttgctctcccttttctcccaccttaaatccatccaccaacgaatctcatttgctacaacattgagatatccagaatccaggtccttcccaccacacctagaacgatctgttgtctgggttcctgcaagcttactggttggtcttctgctcttttctttgctcttctaatctgtactccagaatcatcattctgaatcgcaggtcagagcataacatctctctgcttgaaactccctataggacttcctccgaagtccagaatgaagtcccaggccccttccttgctctccaaggtctgaggtcatccatccccattttcctgaaccaatgttttctgacctcgtggctgacaaatcttcttcccagctgtttccatgacagcaaaactgtactcctcgttcttcacacagcttcctctgctgcactgtttcccgggaatgtgtcatgccacgtgtttaaaaggtttccttctgtacttccttcaggttcctactcaaatgtcagtttttcagatgtttctccctattgccctgtatatagttatactctctaactgctctctatcccttatcctgcattcttctcttttagggttgtattaggccattcttgcattgctataaagaaacacctgaggctgggtactttataaagaaaagaggtttcattggctcacagttctgcaggctgtacaggaagcatggtgctggcatctgctcagcttctggggaggtctcaggaagcttctaatcatggcagaaggtgaagggggagcagatacatcttacatggcaggagcggaagcaagagagggaagggaggaggtgccacacactttcaaacaaccagatcttcagactcactgtcccgaggacagcaccaagccatgagggatccaccccattgatccaaaccctcccactgggctccacctccaacattagggattataattcaataagagatttggcgaggacagatatctaaagtatatcagtagtgtttaccacatgtgacattatcattttatttatttttaaatgtcgtgtccataatgaaatgtaaaatccataaaagaaagtactttgttgtgttaattgctctatctccagaacctacaatagttcctggcacatagtaggcactcaagggtaaccagtaaaacaataaatatacactatatttcttccttttccaagaatgtggagggagggagaaaacactttaaaatgcaattcaaaagatgtcatgaaaagagagagagagagagagaaaaagcatagaaatagaaaacaaataaaaagtacaaaataaaatgttaaaaataaatccatataggttagtaataacaataaatataaatgacctaaactcaccagttaaaaactagagattttaaaattgtgttttaaaataattcagttatgtgctatattaaagagatacctttaaattgcaggacataacataggaaggctgtaaaagatgtaacaggcaaatacaaagcaaagaatgttgttgtacttatagcaataacagacaaattatactttaaggcaaaaacaaacaaaacatgtaccataataccaaccacataatgttaaagcaaaaaaaaaaaaaaaaaaaaatcaccacaatatattaagatcatatgcgtatgccaaaaatgtataaagaaatgactaatagacaacaaatttaggttacttggagatagtgggagaggtggaggttgtgactggaaaatatataaaagtgacttcaactctagtgataatatttaaaaattattctaagctagatggtgggtgcattggtattcaatgtaattttatcatatctgtttcatgtgaaaatagttcataatttaaaaactctcccaaatcatattactactaactttcaatgcaacagagctgtcaaatacaacatgatactttgaaagcctgggtcggagagcgtctcagggaagaaaagcaatacggattggcaagatcacctgaggaagtttcaaggcattctctcaggtcggggcaggtaagagcattcttggctttagcaggatacccaaataggcaagttgcttacactcaattttgtcttccagaaaatgtgtgtgaatagaacaattcccttgcaaggaactccctagcaatgaatgtagataaaatacatagatgttcaatgaactgcatcaagatttatctggaaatgaggcagaacagagctagcaaggtagaaaaacaagatcctacttccttaactcctcaaggcaaagagcccctgccctctttggtctttggattacccatcccctcaggcactgcgtccgcgcataatggacagtcaccagatggtgaatgctggaaacgcatcggtgtttttgaaagtgaaaacagacaaatcaccgcaaataaaggaatcagtgtcagctctctagctgggaaccaccaaggttacaaagctaacgtgactggccctgctataccgaaacggcttaatttctttctggcaaatccacatttacggcagtaagatactaaacactttctttcactttaaaaatatttcgtttgtcactgctgcagtttatgtccctcagatgagtaatacaaggcaaaaatgaagtgaggttgggtggtgtgaacagccttccccttccatgtcagccacgtctatagagaagctcacgcggccctttccctttgcacttctctcctctgtagcaggccgcggggtgagggtgggattaggcggccaattttacaaaactccagggagcgtcgccagcctcgatttcctggggttattcctgggagagaggcgttctcacggacagccaccctggggaggaggaggaggaaaggcactaatggatgaggaggcccgcgcacccctccgcctcccaccccggcgcgccctggaacgccctggagcgcgcccggcttccctcgcccgcctggccggcggcatccggcagccccgccttcagcccgccgggcaggtccgcactccgcagaggcgagcgcgctccggttccagccgggaggtgggcggcgacccatcccgctagaatccgtccagtctctgctcgcgcaccgtgacttctaaggggcgcggatttcagccgagctgttttcgcctctcagttgcagcagagaagcccctggcacccgactctatccaccaccaggaagcctcccaaaagagctctcgccctgtggacgactcggaatccctggaaaagccgggagggagtcggaggcgccagcccactggggaggtggcgctgggcgcgcgggatgcgcggggagccttctctgcaggagccgcacagtgcactgctgcgcgctgggcagtgcggggaagcgccgcgggaaggagcggctccgagcaacaggtgcagcacgcagcccctccgggagccagggaaaaccgccggcgaagatctggagcggtaaggcggagagaagggtctttccacctgcgcggctgcagccggcggatccctcttcccaggctccgtggtcgcgcagcgggcggaggcgcccgggaaggggaccccagtgctctcgagatcaccgtcccttcccgagaaggtccagctccgggctcccgaacccaccctctctcagaaggtcccggcgcaaagacggtgccaccaggcacggccaccggatccccgctcccgctggctcgcgcctcgggggaagctcagactcctaaactcgcactctccgtgctttgcgccgggacccctggccacccccggcgcctactatcccgccctccctccccgcgcgccccgccgctcgccgggacagccccgcgggccatggagctggcggtcgggaacctcagcgagggcaacgcgagctggccggagccccccgccccggagcccgggccgctgttcggcatcggcgtggagaacttcgtcacgctggtggtgttcggcctgatcttcgcgctgggtgtgctgggcaacagcctagtgatcaccgtgctggcgcgcagcaagccgggcaagccgcggagcaccaccaacctgttcatcctcaacctgagcatcgccgacctggcctacctgctcttctgcatccccttccaggccaccgtgtacgcgctgcccacctgggtgctgggcgccttcatctgcaagttcatccactacttcttcaccgtgtccatgctggtgagcatcttcaccctggccgcgatgtccgtggaccgctacgtggccatcgtgcactcgcggcgctcctcctccctcagggtgtcccgcaacgcgctgctgggcgtgggctgcatctgggcgctgtccattgccatggcctcgcccgtggcctaccaccagggcctcttccacccgcgcgccagcaaccagaccttctgctgggagcagtggcccgaccctcgccacaagaaggcctacgtggtgtgcaccttcgtcttcggctacctgctgccgctcctgctcatctgcttctgctatgccaaggtgcacgccggtcgcggggccgagacgcgcgagggagggcggagggccggtgggggccctggggtctcagtgtcccgcggccctgccggagccttggcggcagcctggccccggtggtccccactctggcggcgctggtacggatctgtgcagagaggcttcctggccgctgctggagcgtgccattggcttgcgcaagaaagttacttggagtctgagagatgctggggaaagtttgcagttcacttcgcatggtccagtagaaccagtttctcctcccctccccttcctcggccctgcggcccttcaacgcccccaggttgcctgggcggtaggtaggcgggcgctgccgcatccttcccggtacagcaaaccccgctcggttccagcaactcttcaaccagatcagctgcgcggggaggttaccgccgcggcgctgtgggacctgaggagagctctggtggtcaccagagcgcggaccttttgcgagggtgacgggtccccacagctccctcccgggctctcagctggccgtggcgggggggactcgcggggcggcccctctcccccggggtgcgcagtttgccctcgctccgaaggctttgcgcacaccgggctctgtgaagccgctgctcccggggacagagcctcgaattttattttattctgaagcttagctttgtaaacccaagtgcaaaagggtgtttctttacagagtcttgaccgcaggctccaggaacttggaatggaatggactcgagctttcggcttccccatttcaatcctttttagaaaggtctcctgaacagggtgaagtggttgaggcggcgggtcttcaccctaactgtagcagaggcaccgtccacgcgtgtgggagatagtttttccctttgtacagccgggcagagctcagcactcacattctttttctcattaagtccacaagggtttgaagactttatactgatcaaaacgtcttcagcctttgacatacgtgtttttatttgcgtaaacgggagcttattttaataatcaggtgatggcgattcaccgggtaaaccctaatgtgcgcaacctcctcgctccagagcatcgccatttgaaatacagctgttaccagttccacccgacttcaccgctgtctctcattctgtttcaataaggctgtgactatacgaccacaaataacctgactaggtagaacaactatcacttttaatactcaagtcacaaggtatttttatcaacaaaagtgtttactataagccacctgtttccccccacctatttcatctaggtagattgtgtctattttgaataataatattgctggatattatctgaacggcctgcaccaaaaggttaaatatgaagaaatacagtaccactttgggaggccgaggtgggtggatcacctgaggtcgggaattcgagaccagcctgaccaacagggtgaaaccccgtctctactaaaaatacaaatattagctgggtgtggtggcgggcccctgtagtcccagctactccggaggctgagacagaagaattgtttgaacccaagtgacggagggtgcagtgagccgaaatcgtgccactgaactctagcctggctgacaacggagcgagactctgtctcaaaatcaccaccaccaccaccaccaccaccatcaccaccaccaccatcaccaccaccaccaccaccaccaccatcaccaccaccacccacaccaccaccaccaccaccaccaccaccaccaccaccaccatcaccaccatcaccaccaccaccaccaccaccaatatagtagcagtaagggaatttggaaaagaactctagcttagctatttggaaaatggctggtttattaacgtggtcttccgcagatgctaaacaaaggctatcttacatagcacaattatctgatatgtgcaccatctcatttaatttgcacaactctgtggcttggagctattttattatttacccgtattttattatttaaggaaaaagagctttggaaaggaacacctgacccagattatgaagctggtgaatgattctggaaggattttaacacagggattcccagtcttctgaggacgggacagttggtgaggccttgaggacattgaagtctgagattgagattcttaacatatatggctgttaagttcctaattactgtggagaactgaagcacacgcttccttatttccccaaagccttcagggagaagagctaaaatcttcttactggaaatgacaaagtaagattttaggagtaaattgaattcagcataatattcataatatttgcaagttaatttcagggctgtcatggataggtggagatttcagttatttcaagttgattttctttggctcaggcattaggtgtgcaccatccagttaaggattttgctacttgagtattagtttcaggattagctgttcctccaaaccccaggccttttggatagcctgaaaaaacacagatggctaaaagggaacctgaggttatgatgctttaaataaacaaaaaaacttaagacaattgcattccagagttgccttttgcctccaaattctcacaagtttgtaagggagcagtcttttgcaccagacagtttctgggaaactcatcgaatacatgggtgggaggatgagtcgaagtggtctgcccagtgccccctgaagagccctcccctctgctgctatggagctgttcttcaccaggtctgtgcccctcgctcacttcccttagagtgaattactgtccagaatctccttggtctaccatgaggataaactcaatgggcccactcgactaagttactccgaatccccaggatgtagccagcaggacctgggtttggtttgagctagcaccttcctgtgcacactcagaaatttacagactcaccaagagaccccagtatgttattatcactctcttcttaaacgtcgtcataccctatcatggtacctacattcttcctcctttgctgctgagaccttcagtggggtgcatcataatatatcattctgtgctcatagtaggagctattgaagagaagcagagctaataaaaatagacttgagtattttctccattgaccatttaacagcattcaacattcttgggtgttttgaagtggctgagctgtgatccgaattcctttttggaaggaacaattggagctcggcagcgttatgaagctggtcacatttggacattttgttgtgatttgtccaggtgtccctctttgattttgcttgtgcggcctctcctgttgtctctcctgtgtcctcagtgaccagtgttgtcctgtggtttcccattgggaaggctgccactgagccatctaggcagtcctgtcctcttgggcagggtcctgcctcctccagccctttccttcccctttgaaacgctctcatttgctcctgcaggaaacccctgttctgtcgttgccttgcattcaggttttgatactcccatttcggctggtagaacagtaaactaacaccttgtcaatgtattgagtgttttcccaaatgctcctgcggcacgtaaacacttgttttgttgcagatgttgctgagtcatttcaggaagtgggaagcatttcggtaggggagagaatttaaagtcagaaattcacgtccctggggtggctgcttgttcacctgcatagggcctgggcagctggtaaatatatcctgtggcttccaagtaaggtgtgactaattgctctgaaagtgcctcatctggctgaatggagcaggcttttgcaataagttcaattcgattaaattatttccatgctacagggaacaaagaactggttggaacatggcttccggttccttgagagacttctcagcaatctacagatgctctaaagcacttagtcgccctggggctagattttctctagatttttccctcagatgggatatagcaatgaacttaagtgacagttctgcaggcttgacaacgttgtctaagaccaaatatatgttggaaattcctacatctaaaaccccacattttcatatcatttctcctgagtattacactggcaagaaaagacaaaaatagtttctgtaattgagggagtcagtgtgtttcaaggagattccctgacagggacattaattgtcaaaccttgcaaaaatgttctgtaaatcatcagtgacgctgaatcctcaataagttgtctgaaagcacagcacagtgggtaggatttgaataaagaatgaaaggaagcctgatgggaggtgatttgccgtaaggagaattgcagtggaggcagcccataagaggaaggagaaagaatattttggcacaaacgctggcaatatttgggttggctgcactgaagaaatgtctgatgatattatcttcatttgtttacttgcctgctttccgcatcagatggtgaatttcagaagggcaaatctctagtttttcgatgcatccaggatctaactttgtgcctgacatgtagcagggacctggtgtttattaatatatggggtcctggaagaaaccaaggaagacaatagtgtaataagcacacctgagtgggtcatggcatggctgtttctgggcaaaaccccagagctccacgccctgggcattctctgcaaacaggtgctatggctgtgaacttgtctggctgtgcatcagccttcctggctgctcctaagtgttagaaaagaatgtatttggcaactcatgttcattgttacctaattacctaatttgagtttttattttaatgatcttataaatagtgatgttaccatttcagcatgtcaataattgttaatgcaacataggcagtgggttatgagaggtgaggcgaactgatttcaatagtctgtgtctttcaggtccttaatcacttgcataaaaagttgaagaacatgtcaaagaagtctgaagcatccaagaaaaaggtaatgatcacaaatatatatatatatgttacttttcagagcttagtttacctttgttttttttacttgtcctcacgtccatccaaagcctgtaacatttaggacccttggtgtggctaaggaggtttgagatgagcctcccaccgttaggatgggaatggagggtcggccttggcaagggcaccgtgggtcactccgtgctgcattcaaacttagctgaagatctggggagatgaggaaatgcggattctgctgattgtgcgcctcaccaggaggtgagtgcacttaggttgactgagacagagtgcagagtgcagagttgctgacatgcatacttagagggaaagtatagtcattttgttttatgttttcaatctctgatgtgattccgaaaagccctggtttggttcttgtttaagacaacgttgttataatccctccctaaagccaccagagtgctgggccattcttgcctctttcacccacatgtgctgactctgacccggcaggtaaagactgaagagtggacaaggctgaaagcagattcctcccgttgctaactgactttctcatcccccagccccgatttaaacaagcttctcctgagtggtattacagcatctaacttattgatggtcatgatattctacattttgggggaaaactatttcacaaatcaaggttaaatgaactcttactcagaaaatatctatatagcttctaattttaggaagtagaatgagattattaggcaatatgactaaggagtaggaggttataaccagatattttaacccaaaagtgtaataataacatcttaaaataccttgttttttccttatatttattatgatcaatgacatacctaatttatagaaattatagtttagatcatgtttaatcatgtttacttaaaaattctacttgaataaaggacagctcttcctgactttccttctttatgaacagtaatgtggctaaaaagccatctgatagtccagagtcaaaaccagtggtagagaattggttatagagcacaaacattaagacttttttttttccctggcagcaaaaaattagcttatgttagaaatgcaatcatacagtgtttaggataaccacctaagaatacaaggtgcagtataaataacaagaccatgctatggctttattccattgatcctttcttacatctgaacaattattatgaatatttcattttaggcatctaggccccgcattagagcagctgaccaagtgctaagttatatgaatggaataaaccctgtaagttggtgctttcctcctctctttttagtgatgtgctgttatggtagagattttccatttttctggtatatctattgatttttcctctgagtcacacttcttatttctaagacaatggttctttaaagacaattaaggatagtttctgacttctcctaggacagttatttttagagcacctgctctgtgtagaaccaagccgatccaggggattctaagaggaactggctccgcatggaagccaacattgtaatggaagagatcaatgtgtgagtcccagaggcctgttcaagggggcagtgtttggagcatcagggaagggagagattaatttcccttgggagggattgggctcgtcaaactttaactgagaagacaccattgatctgtgataaatgtgtgttaatgattcaaaagattttatgcttaccaaaagaaataaaaccaaacatttatttaacatttgctgaatcttacttgtgtcgatggtagttttagtctccatatttgaaaaagtattggagagaaattgtgaaggtctcagagaagaacaaaatactgaaaaaataggtcttataaaaatgattagaaaagcttctattttattttacaataaaaaacctaaagatcagtgattagttcagtcattagttatatacacatacacatatatacacaaatatttagatttatgtgagtatatgtatatataatacatatgtgcttacatatatacatatactaaatatatctatataaaattatcttttgcttattcttaccatgaggatctagcatttgaagaagggatgaagattttctttttcgttttcacagcctctgacccttaacagctactgaacagatgtcagatctttgttgatgtatttaattgcctccttgtttgcacagaataaataaatgtggtggtggtggtggtgatgatggtggtggtattggtggtggtgatggtggtgggtggtagtggtggtgatgatggtgatcattgtggtgatggtggcgattgtggtggtgatggtggtggtcatagtgggggtggtggtggtcatggtggtgatggtggtggtcatggtggtgatggtggtggtggtgatggtggtgatggtggtggtggtcatagtggtggtggtggtggtcatggtggtgatggtgatggtggtggtggtcatgtgatggtggtgctggtgatggtggtgatggtgatgatggttatggtggtgatgatggcaattgtgatagtgatggtggtggtggtggtggtgatggtggtggtggtcatagtggtggtggtgctggtgatggtggtgatggtggtggtgatggtggtggtgatggtggtgatgatggtggtcatagtggtgatggtggtgggcggtagtggtggtgatgatggtcatggtggtgatgatggtggtcatggtggtcatggtggcgattgtggtgatggtggtggatggtggtggtggtcacagtggtggtggtgttggtgttggtggtggtcatgatggtcatggtggtgatgatggtggtcatggtggtcatggtggcgattgtggtgatggtggtggatggtggtggtcacagtggtggtggtgttggtggtggtcatggtggtcatggtggtgatgatggtggtgatgatggtggtgatgatggtggtgatgatggtggtcatggtggcgattgtggtgatggtggtggatggtggtggtggtcacagtggtggtggtgttggtgttggtggtggtcatggtggtcatggtggtgatgatggtggtgatgatggtggtcatggtggcgattgtggtgatggtggtggatggtggtggtggtcacagtggtggtggtgttggtgttggtggtggtcatggtggttatggtggtgatgatggtcatggtggtgatgatggtgatcatggtggtgatggtggtgatggtggcgattgtgatggtgatggtggtggtggtgatggtggtgggtagtgatggtggtggtggtcataggggtggtggtgatggtggtgatgatggtggtcatggcagtgatggtgatggtggcgattgtgatggtgatggtggtggtggcgatggtgccagtggtggtggtgacagtggtggcagtggtggtggtggcaatagtgatgatgatggtggcaattgtggtgatggtggtgatggtaatggtggtggtggtatgtgtgtgtctaagaaagagatgggagagaggagcagagaaagggtaagaagagggtgtggaagcagaggcgtgatgagaagggaggtggcggagagagggggacagaggcaggagaggtgagacaggggagactcgggaaggaaagcaagaatacatggcaacttccctgaagacaggaactgggttggtccatcgtgggtatttccccaggtctcagcacagaaaattgctactggtgcacacgtgttcatcatttgattggtaatggaagatgtgacagggatttggctacttgtttccagccctttctctcaatgtataagtaaagttccctttctcagctctgtatccactggtcttagtacgttcaggctgctttaagaaaataccatagtctgggtggctcataaacaatggaagtttatttcttgcagtcctgaagcttggaagcctgaaatcaagctcctgcagattcagtgtttggtgagggccgttttctggttcatagatggccccttctctctgtatcctcacagagtggaaggtgaaaggcagctctctgcgccctctttcataaggggactggtcccattattcatagggtgggaggtgtaaggcagctctctgggcctctttcaaaagggcactagtctctgtgtcctcatagggtgggaggtgtgaggcagctctctaggcccccattcataagggcacggatcccattatgagggctccccccacctcatgacctaattaccatccaaaagccccacctgttaataccatcaccttggtgattaggttccaatttatgaattttttggacggggtggggacataaactttgagatggtgccgccgtccatacggggctttcctgttgagagttataattattatggggtggggagattggtctttcatgataaacatgctaacagttattctccatgtttggagcaagtgcaaaagaagaataggatttctactgcaggaataaagggctaggattgatcacatgcttttcttaaactctgctagacataaagaaatgtttctggctcaaagctgattgttaaaaccttggaagacctcaaaatgggatagacacccatactggatggttgcttcctggagaaaattggattaaaggacctcttgatgtcctatcaagccactgggttcttttaatgtttgctttttttgttgtttctttggcttaaagtaattcagtaaggtttttggatgtcatttatacaatttgtgaggtttttttttttttatcattctcaccttttattcagttcttttctccccagccaaattccattagacatattgtgagtaaaattctttgaagaaagaacagacatctcagatgatttgaaaaagagcatctcacaataagaagagagactaatattttttcagatactttcagcagaaggagcacaaagaaaccatgctattaaaagacctaaactcaagtgtaagaagaatttgtataaagatttagcacataattttaaacaataattttttctccatcaaaagataatgttgagattctatacgctaaatagacaaaggagggaagcagtgcacacacaggggacatgcccgtctgacggagacggaggaccctgtaagagagtagaaagaatcacgtcataaataaattttaaaaatcagcctcgtcctccacagaggggagttctctatgttactttctctgcgctgtatccactggtcttagtctgttcaggctgctataagaaaatacaacagcctggatggcccataaacaacggaaatgtatttcttgcagtcctggagtttggaagtctaaaatcacgctcctgcagattcagtgttttgttactttctgatgttactttctgatgtttccatgggaaagacaggaaggaagtggcttttccagccctttctaaggaaaggagatgcttcagccttaggggttgataccaagcattttttattgcctttaaattgaggtggggaagacaactttccttttgttgtgacttttatgtaattcatcagtggttctccaaacagtttcttgagctccttttaaatttatttttagggatggggtcttgctttgttgcccaggctggggtgcagtggtgtgatcatagctcactgcagcctcaactttgtgggctcaagagatcctcccacctcagcctcctgcatagctgggactacacgtgcacactgctgcacccggctaagttatttgaaaacattttttaaaggtggggactcaggatgttgtccaagctggcctagaatgcctgacctcaagcgatcctcctgcctcagcctcccaaagtggtgggattacaggcatgagccactgttatctggctgagctttttaaaaaggcagattcctgggtaactagtaaactctaccaattgctttaaagccataagagatgaggtatagctatccgaattaaaaaaaaaaaaaaaagctttgcactggttgaggatgggcatactaacctacttaaatcccagggttgaaattagtacacgtgcattattttgccagatctttaactttgagcgtgtctatgctaggcatatatcgtttcccgagtttgacagtgtggagcagtagtaaatcaaaaaagatggttttccactggcatggaacttcttgccccgtgtcccatcttctaccagcatccgttgcaagggaagaatgaagacaaaaatcatctactgttttcaaccatgcacatgggtgtatttgccacattgtcattgctacgactgaattggactcacctcaaagatagcaggaccaggtgcccagggcctgtttgcatggagttggcttttaccaaccaggaggccttcaacttcaatggcctgagatgcttgataaacaagaaaatagtaatcccctggagatatttagctgggaggatagtcagtgttgacaggccttctattaaactcttttgggaacaatctgagacagatgatatagtttatgcaaatacccattaagccttctttcctgatatttatgttgcaaactgtaattccatctcatttcaaagctgctggtaaaccaagaaaaagaacctgattcttatccatggctctaagagcaatgggactagtaaaaattaaaaggtaaacttggaatgagtcacagacacacaaagttaacaaacactgccagagaaaacactccggcctcagggcacactaccatttgccctgtggatgttgataaggcatagatcttatcagtaagctgctgggatagatttctgctttgtacttagtaaaattgtctaaaagaaacaatgaaatgcaatacccggagggtaaccattctgtgacatagagagatggtctgattgtcttagaaagaaatgatgatgttttatattctatttgtaggtataattatatctagattgttttgattaaatcatctgagaatggcatttctcatccactaatggataaatggattgatagaaggcactcccttaatatatgtgagcacattatctgcttgctttgtgtgtcatgcaataagtggctttaatatgtaagcttgtaccctgtaaaacccgtacttagatttttatacctgagttgtttgtcgtgtttaaatagatgaggcatggtctaggaatcatttcattggttcatcttattcttagctgaggaagttgaggctcagggagtttatgacattttgcaaaggtcatacaaccagcttatggcatggccaggtgggaacacagacctgctgtcagtcctggggtcttgtgcaatccctggtgcctctcgatagggagcttaactctcatctcctgtccacctcgctagtaggatttgtcctggccttgatctgagatctagccctccctctactctctctgcctggatcctgggcacagcttcctggcttccagtctccctctttgataaacatcatttcacgtcttactttgctacctcatgtcaatccttgaagagctggcatctcatgcgttatagtctggttgtcatttctattgcagtgggactccagttcatgggaagtgataagaagagtctttttggccaggcacagtggctcatgcctgtaatcccagcactttgggaggctgaggcggacagatcatgaggtcaggagtttgagactagcctgaccaatatggtgaaaacccgtctatactaaaaatacaaaaattagccagcgtggtggcacacacctgtaatcccagctactcaggtaggtgaggcagaagaatcgcttgaacgtgggagatggaggttgcagtgagccgagattgtgccactgcactccagcctgggtgacagagcgagactccatctcaaaaaaaaaaaaaaaaaaaaaaaaaaaaagaatccttttgctatgtaggatttcccctcctagcagtgtggagctgtggttcccactgccctgtgatagtcctgcagggtgtgaggtccatgcaggatcactgtaggaagtcctatgtcccaagggaaaatctgtggtgggacagtgctgtctcagtcatggagtcactttcccatgtcttagtcttccctccatgtgaagttataagaaaaataaggctctgtttattttcattctttttctctttctcttcgttccccccaacttttcttctcccacttatccattttagagtatttctgtttagaaaacagactggtggccacaggtaaacccttcatcacatctgtatgctgtgatgggaaggccaggggagggggtctgctttcctgctccatgaaacccagtgaggtctgggaagagagtgggtatattagtctgttcttgcactgctaataaagacatacccaagactgggtaatttataaagaaaagatgtttaattgactcacacttccacagggctggggaggcctcaggaaacttacaattatggtggaagggaaagcaaacacgtccttcatatggcagcaggaaggagaagaatgagagtaaagggtgggaaaagcccctataaaaccatcagatctcatgagaactcattcgctatcatgagaatagcatgaaggtaactgccctcatgattcagttacctccttttgggttcctgccaccacacatggggattataggaactacaattcaagataagatttgggtgggaacacagagccaaaccatgtcttactgctcctggcccctcccaaatctcatgtcctcacatttcaaaacacaatcatgcccttccagcattcccccaaaatcttaactcattccagcattaactcaacagtctgagttcaaagtctcatctgagacaaggcaagtcccttttgcctataagcctttacaatcaaaagcacgtacctattatacttcctagatacaatgggagtacaggcattggggaaatacaaccattccaaataggagaaattagccaaaacaaagaggctacaggccccatgcaaatctgaaatccagtggagcagccaaatcttaaagctccaaaatgatctccttggactccatgtttcacgtccaggtcacactgatgcaagaggtgggctcccatggccttgggtagctcctcccctgtggctttgcagggcatagcccccttccgggctgccttcatggctgatgttgagtgtctatggcttttccaggtgcagggtgcaagctttggatggatctaccattctggggtctggaggatggtggccctcttctcacagatccactaggtaatgccccagtggggagtctgtgtgggagctctgaccccacatttccattctgtactgccccagcagaggttctccataaggactctgcccctgcagtagacttctgcctgggcatccaagcatttccatacatcctctgaaatctagatggaggttccccaacctcaattcttgacttccgtgcacctgcaggcccaacctcatgggtaagctgccaaggcttggggcttacacctgctaaagcgatggcttgagctatatgttggcccctattagccacagctgggacacaggacaccaaaccccaagactacacaaagaagcaaggccctgggcttggacatgaaaccacttttcctcctaggcctctgggtgtgtgatgggaaaggctgccatgaagacctctgatgtgccctggaaacattttccctattgtcttggtgattaacatttggcttctcattatttatgcaaatttctgcagcctgcttgaatttctcctccaaaaatgcgtttttttcttttctattgcatgatcaggttgcaaattttccaaacgtttatatgctttgcttcccttataaacgtaagttccaattccaaaccatctctctcaagttcaaagttccacagatctctagggcaagggcaaaatgccaccagtctctttgctaaagcatagcaagagtgacctttactccagttcccaagaagtttctgatctccatctgagactaccttagcctggacttcattgtccatatcactatcaccattttggtcaaagacattcaacagtttctaggaagttccaaaatttcccacatcttcctgtcttctcagcacccccaaggctctaggaagtttcaaactttccaacattttcctgtcttcttctgagccatccaaactgttccagcctctgcctattacccagttccaaagttgcttcgacatttttgagtatctttacagcagtgccccactctctgcagtaccaatttaccgtattagtccattctcacactgctaagagacatactcaagactgggtaatttataaaggaaagaagtttaactgactcacagttacacagggatggggaggcctcaggacacttacaatcatagcagaaagggaagcaaacatgtccttcttcacatggcagcaggaaggagaagaatgagagtgaagggtcgggggaaaccccttataaaaccatcagatctcctgagaactcactgtcacgagaacagcatgaaggtaactgcccccatgattcaattacctctcactgggtccctcccattatgtgtggagattatgggaatgacaattcaagatgagagctgggtggggtcacagccaaaccatatcagtgggattgctgccagctcacgctctgatgcttcccctcccaatgtccaagcatgctctaaaatattacagcctggactatgtctgagagaaagaagttacttgagtcctaacctttggccaagaggctgaaaggtgcacctctttgcgcttaatgttccttttttcctatgagaagtaaacttgctggtgaagtgaacagaaagctgaagccatcgaacagaggaggctggggaagcactctgtcccttcacgccagggaactgagatggaggttttcttatggcagcctttattgcccacacagctagcataatgcttcttgagaagcagccctgttgggtgcagagagggaagtgtggcttttgatgaccagaattttccctgcagctcagctgcccagtgcatgggctggggagcatgtcggcctggctgccagccccacctttgcattcagctgtgggacactgggcatttgctcttcccctcctgagtctcagtttcctcatctacaacctgtgggtcatgacagcatctgcttcatagagtcgtaaaggacattcggtgaaataatgcatgtggtcccatcatcggtccactagtttcgatggctctgttgtgaccatcgcggcactagaggttgtgtgtgggttttgagctgcacttgttagagaaccatctgtttgaggagagaaccaactgattggtttgtattttatagtttaaaaaatactagactcccgtaattaaagcattttaataaattggatcattgccttttctttgaatccaaagacagagttttcaattaatcacaaactaagctatctagctcttgtctttcaacatgtgtggaacagacgaggttgccctgaggcttaattccagtcccataggtttgtggccagtggaggaggccatggccatgtatacaggcacatgcttgttgagcataggaggttgatgtcctctcctgttgaggtccctaaccagcgatgacttcctcctaccatttgctcagtagaaatcacaaaagaaacacgaagaccctgcctctgatttctaagtatttctgatttaggagcagcaaagaaagagttaaaatgaaagaaagcaaaagggactaattcggtccatagactgaaactgaaatgaaacacatcgctgcatcaagtaatttggccttgaatttgccaaagtttaacgaggagaaataaacacttacacacctgctcatagaagtgactatttggagcaaagtccagcgctcctccgagatgcattgctggtgatacagctgcggtgggtgagatgcttgaacagttttgctagtttaaaagttacagtctctaactttgtacttttctagttccatgacttgaagcatacttcctataatgcatttcacatatatcacaaaattattactatggaaggtaatgacaggtcttggaaaagttatgaacaaaattattatggggagtgaaggttaacacttaaagcagatgtagtatccatttttgatctcatgaaaatatacataaaattagcttaggatgtattttaaaatgctggattccttttgtgttgtaatcaatgaatttccttccttcttcttctcccttaccgcctcctcctcctcctcctcctcctcctcttcttcttttctagactgcacagacagttctggtggtggttgtggtgtttggaatctcctggctgccgcaccacatcatccatctctgggctgagtttggagttttcccgctgacgccggcttccttcctcttcagaatcaccgcccactgcctggcgtacagcaattcctccgtgaatcctatcatttatgcatttctctctgaaaatttcaggaaggcctataaacaagtgttcaagtgtcacattcgcaaagattcacacctgagtgatactaaagaaaataaaagtcgaatagacaccccaccatcaaccaattgtactcatgtgtgataaaagatagagtatccttatggttgagtttccatataagtggaccagacacagaaacaaacagaatgagctagtaagcgatgctgcaacttgttatcttaacaagaattcaagtcgttttaattaaatcccacgtgtgttaaaaagtactttgatccatttaggaaattcctaggtctagtgagaattatttttcaattttattttagttctaaattatgtttcagaaacaaaagacaatgctgtacagttttattcctcttcagacatgaaagggaacatatatattccatatatatgttcaactcttcatagattgtgaactggcccatcaatatggtcaggaatatttgcagtctacattttaaagccaatttatttagaaaaaaaatttgagctttaattctttaattttaagagaagtaatattgtgaactatgtattttaaaatatgatcatggacacacaatgatgaattttttggccatttacatagacatatctattaagtggaaagaaggctttctgaagtctgtttgcacaggtggcatttgcttccaattgtagctagcgcacagagctttggaagcctgtcattatgagatacagtcggtttacctcaggagtcaattcagtgttgtactggtgacctgggatgcagtagtaggcactgttgattcaaatttatcctgtgaaactggctttatagagttaacaaaacagagtcagagaccactgtcttaacagtggaagatgcaaataagtttttgagaataaaactggattttgaaattttacattagtacttgacaaaagttttcattttgccttgaatggaacctactaaaaagagagatgaaaaaaaatcagcgaggttgatgtagataataatttctatgggaccaaagactagacagaattcagtaagtcacatgaagtaatggtcatgcctgtacataaagcatatttcatgtttgatttagatgacattcaaaaaaaatcatgggactgaatatacctggggtatcctatcttgtacaaatgcatgctttttcattaaatttgtaatgatgtttaatgaacatttccaccaaacattatttcctctaaaaatgttaatttggggttaaaaccatcaccatttgaatttcaaatgtagttttcatgacaattttatattgatgtgtgtttacaatgagaaaatggcatgaaaatattaaattgtcttgtatcggaaaagtacttttcagactgtaagactttgatatgttttaggaggcaacaaaagcaagaagttttttttttgtttgtttgttaaaaaggatttggccaagcacagtggctcatgcctgtaattccagcactttgggaggtccagctgtgtggaatgtacttgagctcaggagtttgagaccagtgtgggcaacatggcaaaactcggtctctactaaaaatacaaaaattagctgggtgtggtggcgcacgcctgtagtttcagctactctggaggctgatgtgggggatcacctgagcccgggaggtccaggatgcagtcagtcaagactgcaccactgcacttcagcctggatgacagagtaagactctgtctaaaatatatatatatatgtgtgtgtgtgtgtgtgtgtgtgtgtgtgtgtgtaatgtacctctgtgccaaatcagcactccacatgaaacatcaaattttagataaaaatgcaaacttgacataagcctttggcatgctaatttttttagctcattcacttactttcactaatcatatttcagtgactagtgtttacatttgcaatgttattaataactctctggataaaaggaaagaaaaacgttagaaagattttgaagtgatgtattatgtttgttgactagaagaagaaattgtgtttatgtgtaagtgagggtcttaaagaatatgtcctttgcatcgaatgttttttgcactttattcaaatatataggagcagaaaaattttatcctgacgatgatacttcctgtgatttgtggaacttgaagttgctgttgcaaactccagaacaacttctttgggtgtgaactcacaaaactgtgtaaagaagtgccttcttgttgtgtttgagtttgcatgaatggaaatgatttcttgcaccatggctatttctttgttttctccttctgatctgtaagcatataaatggaagtatttaaaaaaatactgtagctaatgttgctattttctagaggcatgccgaaaatgtgctgtgcctttggtccttcccagatgctactggcacgtctgaagcttgaggcatggtacaaaaagtaatagcttgcgcttgaaacccccccccccccgccactttgctaaatgtaaatgctaattgttgcattttacagttagataggatatacttcctgcatattgtcattctaatcaattcctcttactcagagttttggctgagtctacttctaaaacaaattttgatagggataatgacatcttctgcaaagatctaaacctctacaaaattttctgaataaagagtttcagaagaactcgtaaacagaatgaaattaaccagagaagtataggagtgtgttgcgtttgccaagcatctgcttcccagctagatttccccctaatatacaatgaccaattctgaagcaccttcttttccgtcactaaataaagacagcttcccaaggacacactttttctcccagcatcaggttgagggagaaatattgcttatacctttgaagtcaggctgcttgaaactcacattttcagtttacttcaaagaaaactgatgctttctaagcagatttggctgtctcagtgcccaaggcagctgttattttcctaggctttttgctttcacgtaaggagacaggctttgggatatttagtagctgaaatgcttgctgtttcacatgcataagcaaccatttcagtgtcctgctgatgaatacagtgatgtggatggaaacgttttcttgtcctatatcctggggataggaaacagattctctgtgctcttctgaccgggtatgtactcagcaacatgggggactgaggccattttctgaatactttaggtaaattacttttgcttttaactaaattgttttattttacacattgggagtaaaaccatttccgccccatcccaatctcttgtgcttttatcttttttatcctaactcacttctatccagatttcctctcgataatatttaccacagataaattcatctttcagcgcagatataacaaatcagagtggggaggagagatgcttaaggaactgcatgagtcatgcaaggctcagaacttcttgtggctcaactcgaaatcatattgcattcctgcattctcccagatgctttgaggcagtgcagcgatcattctaatatgttaactgagacccaagatctcagcaggagaggacagcttatccaagcatccctttccttttcagtcatggccatggctatctgtaaacaccaaaatgctcatgctgaagcagcattacattgaggaaaataacctattgggcagcttcatcatgttcttgctttaaatgatttatcaaatacatgtatgtaaactacatagtcactaactgcgaaaatacatcaatgtggctacttcctctggaaagttactgtctaaaatttgtaaattttaatcttcactgttgcacatattttccatgtcttaaatttgtaagtgggtttctatgaaaggtaatcgtattcttcttgaccattaaaaatgttgcatgtaaggctatttctcaagtagatgttaatgacttgtttaattattgacttacttattttaaaagctgtatgtagtaagaacaagtaggtggtttaaaattcagatagttacatgttggcctggaaagaacaaaattatgaaatggtaattatatctgattttatttaaccatattttaatattttctcttttagaagtggaaaagttgagcctgaggaagaatttaaaatgcttaagacatctttgatgggggctgtatttgcattaggcagaggtgtctaaggagagtgtatcgtgtattgtgatgcattagcaggatgttttgttcatcgacttgtgaaagtgctgtggataatagatggtggtttcttttcttagtgtggcaggttcactcacattcatgtttttgactttagctgccatcctggggttctgagggtagcatgtctgtttgactgggcaagaccctcacataccttggcaggccctggctttcgtttctctgtggtgcctggtgctactcacagggctgactcacgggcagatgctccccatccttccccataggccctgttcccgcatccgatgattctcaggttttgttctaggtgcagaaatagtgggagaggccataatcgtgaatgatgaataagaagggaaggtggggccgggcatgtgacttatgcctgtaatcccagcactttgggaggccgaggcaggtggatcacctgaggtcgggagttcgagaccagcctgaccaacatggagaaaacccgtctctactaaaaatacaaaaattagctgggggcacacatgtgtgatcccagctactcaggaggttgaggcaggagaattgcttgaacccgggaggtggaggttgcaatgagcctagattgcaccattgcactccagcctgggcaacaagagtgaaactctgtctcaaaaaaataaaaattaaaaaaaaaaaagaaggtggccagtgagggttttatctttgtattcactggaaataacctcagctgaattttctctctgaatcttttcaatgttggctccatttgccatactcagacaattgcttgaagagctgaactgttagctcaagatttcgttggcactgttggatagaaagcctctccttttctgctggagaagagatttctcaggccaagttgtgtagctccaaattctccgcaattagagaaggcacagtaaagaaaagatcccttgctgatggaatggactggaactgagctccactgtttaaatttttgactctcaggtagtggtgatcgttatggtaacccatgaactcggatgaatttcggggcctgctgtgggttttctatgggacaccatataccacagtactgtatttcaaaatattggatattgattatgaacactggaactatttatgtgtcatcattccaaagaccattgtgatctatgaagctcctttatttgctggctagattgtccaaaaacaagctcacttgtttttgggcaatctagccaaggtgtcacataatggagaaaaatgcagatggtcctgtggctggtgtgaatgaagaatgacctgggcccaacatagaacttttccagtatggtgagcatcaaagtaggcagacatccaaaagccaagtgaagggcagatagatccccaggtgccacccaggctctgcaggcaaagctctcagggccccatttgtgtttgtgtggcctgcactgtgtaagtgtcgttcccctaggacttctgcaatgggataccaaagatgacgtgtaaggccttcagtatataatggacttgtgccaagtacctaagggttcactgccttgtttgaggaatcgcagagcatcatttctgattggttcttagagcctgcatcttgtaccactgggacttctggagacctctggggaccgttgactatgctgggagggtgcagaaatgaagctgatggcagaagcaggctcccagctcctcttcttctgctcagccaggtgattcttacctccattggcctttggatgtctgcgtaataatttgttgagaatcattagagaacaactaatccaaaaaatctatcatcctttatttgtgttgactttctgattatgccttcattcactctttttattacttatacacatgtctgtttttattcttccctactcttttcttaaagttggtcatatttctacacttgagatcttccagtttctgtgaatgttgaggggttcacaaagtggcttggcctcagacctctatatccttgttgttctgtttggacttaggacttttttcctggctatcctgccaatacttttccatctaacagaaacgcaagcttcaagagcaagttatttttataacagatcatgtgagcaattcctccatagcattggttgtagaacaggtcagttggcatgtggcctcctgagggccttgcatggggttctggacccagcgggggccacatctctgagaattcgttccctgtgggtgtctggggtgcatcgttacttctgagatgttatgactcagcagatgagatttgtccgtctgctcagtgagaggaattccaatgctgggtcttgactcccgctgcagggagctctctgggcccgggcatgttggatggagttgtgatgggtgtgcctccctcggacttactctggccaggaactgcatctgctcctctaaggagatttgagcaggtgaatggagtttctgtcattcctggtctagagttcatgtgtgaaggtcaaatataggtggggacttggcagcacacaactctgagtgaaagacacgatcagcgtgatagacaggtgtcttgctatgtgacttgccattgcggtcactggttatacaaagtctctgtttagaaatagcaaagatccaagaaagcagaagagtgggggtgggagtggggctaaatgtgttgctcttcagtggaaatctgcccattttgttgaaaagaaaggaaacagggtacacaaatgctgtttgggaacattgtgtcaggatcacctagctttgacgatgagagtgttttttaaaacggaaaccatgtcattttccttctagagagaatttcctggtatgtcaatgtagcttcagaaataggtctcagtgttctggctcagggcgaggttacaaaagaggcttcggtagcgtcctcaggcccgcgtgccctgtgttcttaacagcctcatggggcctagaggaacttttacatggtagacactgagtgaatacacagattcctagatttgagatattttcaaaatagggctagcatgtataaagaatcaaacttagtcattccattgaagtgaaattggattataatttagaaatatttataagccagaaatggttgtgtaaatgttagttttcatattttggttttctaagagtcacattttattgccatatagcacaaaatttgacaatgaggtatagaaatccaaaattttcttgggtacaattgaacaaatcttttaatctcttcagttctatctgcctaagtgaggagagtagttgtggagcattgtagaaaggataaaatgaacattaggatactgagggtttggtctgaattctgttttttcattgctactggaagtgctgtctttggtatcctcatgcatacaagaaggatttggaaaatgtcagtgagtttgaaactggctgtacagttgaatgagctgggcagttgaaagtacccgtgatgctctggccttaccttagatcagagattcttatattttatcaagcatcagaatcacctgcagagcttgttgaatgcagattgttggccacatctccagaatttctcattcagtagatttgggatggagcccaacgatttgcagctggtccagagaccaccttgtgagatctactacctgatttaattggtttgaaggtgaaggtggagtccaggctttttaaaacagtgtctgtattttcagagcagataaccaatcaaattgagcagatggtcttttaaagtctaagcttctatggttctgtgaaaaaaattgtttacatggaatttaaatcattcagaatttttattgcttacattgatcagatccataaaatatctgtttaactattacattaccctagctacagaaatttgtaagttttcaaaagcatgaaggagtttaataacttgtaagactttcagagattgttataatttttgcctcaaaaaaataaaataaaatagcttggtggaaaagagcacctatgcattcaatttgtttccctcaaatgctaagggttaaaatagtactcaaaattgttagatgtgaagttttgaacccagtgtttaaactcagtgtttaaatatttgcatgtctttctatgtgactgctaatttttaactacattattatctctaagagataaataaactttccctgtacttaaagtttttaaattaagtatcttctgataacataagtagtatgagtaaggaaaaaaaatctatgtgtactgtatttttaaattttaataaggtttgatatggtttggctctgtgtctccacccaaatctcaccttgaattgtaataatcctcacgtgtcaaggaccagcaggtggagataattgaattatggggccggtttctctcatactgttcttgcgatagtgagttctcaggagatctgatggttttataagcatctagcatttcccctgctggtacattctctcttcgcctgctgccatccatgtaagatgtgacttgctcctccttgctctctgccatgattgtgaggcttccccaccacttggaaatgtaagtcaattaaaccactttctttagtaaattgcccagtctcgggtatgtctttatcagcaatgtgaaaacggactaatacaacgtgattgtttaaatgctgatatgaaagcagtgctgaatgtggatcttcttatgccagatactgttataattattctctagagagctggccatacaatttatctcattatttatagatctagcatgaatgccagtaagctgacaaagccaaaagccaaaaactaagagtttgtattaatccagttaatgccaaatctagtcatcctccatcatcctacctctgtgttctgcatgaaatataattggcctttgtgatggaaccagttttcttgcattgaaaataaaatttgttcctcaaaatgctctagtttaagagtgtgctttttttcccaaacaaaatggaaataattttctgttcccattaagttcttgaagacactgtattctttagttactgcatatttgagaatattaatttgttgcctttatacctgaaaaacaatgtgagatgaaattattttattgcagtatgtttttattaagatatctctagacccagcttagaattttgaatgttactagaaaaaagtcagaaggcaaactgatgcccccattttaggtaactagcttttttccacttggatgagctgagatttttagagttactgatgcctgataccttcaccagaatgtgttttcatcactctctaatacctgaatattcttcataaatagaattatatttccataaacatgaaagggacatttagactggtaaagtgaccatttagtctggcaattccaaatcttttttcatgtaaggattcttttacaaatataaaattattcccagactttcatatgacaataatgtacttttagtatatgtcaataaatacaagatgaaaaataaaatgaaaaataaaactacagacctctatctctcgtggatataaacacaaaatcttcaacaaaatgttgataaatcatatccagaaaggtttaaaaagaattatataccattaccgagaagggtttattccaggaatgcaaggctggatcaacagtgaaaaatcaatctatgtaatctgccatattagcagcctactaaaggaaaattggactatcataattgacacagaagaagcatttgacaaaatccagcaccattcatgattaaaaaaattctcagtaacctaggaatagaggaaaatatcctcaatttaataaatagcatctacaataaaactctagagctaacatgttttaatagtgaaagacagactgcttttcccttagataaggaaaaaggcaaggacatctgttcttatttaacgtggtatggaagttgtagtcactgcaataaggcaagaaaaaaaggaaaaggcatatagagcagaaaagagggattaaattgtctctatttacagcggacatgattatctatatagaaaatccccctggccgggtgcggtggctcacgcctgtaatcccagcactctgggaggctgaagtggtcagatcatgaggtcaggagttcgagacctgcctgagcaacatggtgaaaccctgtctctactaaaaatagaaaaattagatgggtgtggtgatgggcgcctgtaatcccagctacttgggaggctgaggcaggagaattgcttgaacccaggaggtggaggtggcagtgagcctaaaataaaggacttggccacagaatattacatctggttcctgagattgttccagtctagtatctcctttctgtagtgatcaaaattttgaaagacactgtgataaaatcaatagatttcaagtgtaatgacttttaatattgtctgctttacagtgacttcctctagccacatctgtaatgctgcagagagttgcctaatttttctttccactttggcttgctgattattttatttagtaagaagaagctattttccttctgcatacttacacacatttgatatgattttcttttctttctttcttttgttttttctttttgagatggagtcttgctctgttgccaggctggagtgcagtggcgcgatctcagctcactgcaacctctgcctcccgggttcaagtgattcccctgcctcagcctcccaagtagctgggattacaggcatgcgccaccatgcctggctgattttttttgtattttagtagagatggggtttcaccatgttggccaagatgatcttaatctcctgatcttgtgatccgcccacctcggcctcccaaagtgctgggattacaggcgtgagccaccgcgcccggccttgatatgattttctctacatacaagggaaaatattctggttcattggtgttgtcatctgtggttaagataattttaaaaacaaatacaaaaatgactgcaattatggtgtaaataagatcagtgggtcatttatgttttttttaagtgaaaaatatttatttaaagaattcatagactcagcagttaagagaatattatatcttcagttgaagccattttaaaactgcatattccaatatcatcatctcaaggtgtaggtactatttaatgatagaataaaatattacttaatattgcaggaaaaaa

SEQ ID NO: 744 - DNA, 3061 bp, Homo sapiens
atcccgctagaatccgtccagtctctgctcgcgcaccgtgacttctaaggggcgcggatttcagccgagctgttttcgcctctcagttgcagcagagaagcccctggcacccgactctatccaccaccaggaagcctcccaaaagagctctcgccctgtggacgactcggaatccctggaaaagccgggagggagtcggaggcgccagcccactggggaggtggcgctgggcgcgcgggatgcgcggggagccttctctgcaggagccgcacagtgcactgctgcgcgctgggcagtgcggggaagcgccgcgggaaggagcggctccgagcaacaggtgcagcacgcagcccctccgggagccagggaaaaccgccggcgaagatctggagcggtaaggcggagagaagggtctttccacctgcgcggctgcagccggcggatccctcttcccaggctccgtggtcgcgcagcgggcggaggcgcccgggaaggggaccccagtgctctcgagatcaccgtcccttcccgagaaggtccagctccgggctcccgaacccaccctctctcagaaggtcccggcgcaaagacggtgccaccaggcacggccaccggatccccgctcccgctggctcgcgcctcgggggaagctcagactcctaaactcgcactctccgtgctttgcgccgggacccctggccacccccggcgcctactatcccgccctccctccccgcgcgccccgccgctcgccgggacagccccgcgggccatggagctggcggtcgggaacctcagcgagggcaacgcgagctggccggagccccccgccccggagcccgggccgctgttcggcatcggcgtggagaacttcgtcacgctggtggtgttcggcctgatcttcgcgctgggtgtgctgggcaacagcctagtgatcaccgtgctggcgcgcagcaagccgggcaagccgcggagcaccaccaacctgttcatcctcaacctgagcatcgccgacctggcctacctgctcttctgcatccccttccaggccaccgtgtacgcgctgcccacctgggtgctgggcgccttcatctgcaagttcatccactacttcttcaccgtgtccatgctggtgagcatcttcaccctggccgcgatgtccgtggaccgctacgtggccatcgtgcactcgcggcgctcctcctccctcagggtgtcccgcaacgcgctgctgggcgtgggctgcatctgggcgctgtccattgccatggcctcgcccgtggcctaccaccagggcctcttccacccgcgcgccagcaaccagaccttctgctgggagcagtggcccgaccctcgccacaagaaggcctacgtggtgtgcaccttcgtcttcggctacctgctgccgctcctgctcatctgcttctgctatgccaaggtccttaatcacttgcataaaaagttgaagaacatgtcaaagaagtctgaagcatccaagaaaaagactgcacagacagttctggtggtggttgtggtgtttggaatctcctggctgccgcaccacatcatccatctctgggctgagtttggagttttcccgctgacgccggcttccttcctcttcagaatcaccgcccactgcctggcgtacagcaattcctccgtgaatcctatcatttatgcatttctctctgaaaatttcaggaaggcctataaacaagtgttcaagtgtcacattcgcaaagattcacacctgagtgatactaaagaaaataaaagtcgaatagacaccccaccatcaaccaattgtactcatgtgtgataaaagatagagtatccttatggttgagtttccatataagtggaccagacacagaaacaaacagaatgagctagtaagcgatgctgcaacttgttatcttaacaagaattcaagtcgttttaattaaatcccacgtgtgttaaaaagtactttgatccatttaggaaattcctaggtctagtgagaattatttttcaattttattttagttctaaattatgtttcagaaacaaaagacaatgctgtacagttttattcctcttcagacatgaaagggaacatatatattccatatatatgttcaactcttcatagattgtgaactggcccatcaatatggtcaggaatatttgcagtctacattttaaagccaatttatttagaaaaaaaatttgagctttaattctttaattttaagagaagtaatattgtgaactatgtattttaaaatatgatcatggacacacaatgatgaattttttggccatttacatagacatatctattaagtggaaagaaggctttctgaagtctgtttgcacaggtggcatttgcttccaattgtagctagcgcacagagctttggaagcctgtcattatgagatacagtcggtttacctcaggagtcaattcagtgttgtactggtgacctgggatgcagtagtaggcactgttgattcaaatttatcctgtgaaactggctttatagagttaacaaaacagagtcagagaccactgtcttaacagtggaagatgcaaataagtttttgagaataaaactggattttgaaattttacattagtacttgacaaaagttttcattttgccttgaatggaacctactaaaaagagagatgaaaaaaaatcagcgaggttgatgtagataataatttctatgggaccaaagactagacagaattcagtaagtcacatgaagtaatggtcatgcctgtacataaagcatatttcatgtttgatttagatgacattcaaaaaaaatcatgggactgaatatacctggggtatcctatcttgtacaaatgcatgctttttcattaaatttgtaatgatgtttaatgaacatttccaccaaacattatttcctctaaaaatgttaatttggggttaaaaccatcaccatttgaatttcaaatgtagttttcatgacaattttatattgatgtgtgtttacaatgagaaaatggcatgaaaatattaaattgtcttgtatcggaaaa

SEQ ID NO: 745 - protein, 345 aa, Homo sapiens
MELAVGNLSEGNASWPEPPAPEPGPLFGIGVENFVTLVVFGLIFALGVLGNSLVITVLARSKPGKPRSTTNLFILNLSIADLAYLLFCIPFQATVYALPTWVLGAFICKFIHYFFTVSMLVSIFTLAAMSVDRYVAIVHSRRSSSLRVSRNALLGVGCIWALSIAMDVAYHQGLFHPRNQTFCWEQWPDPRHKKAYVVCTFVFGYLLPLLLICFCYAKVLNHLHKKLKNMSKKSEASKKKTAQTVLVVVVVFGISWLPHHIIHLWAEFGVFPLTPASFLFRITAHCLAYSNSSVNPIIYAFLSENFRKAYKQVFKCHIRKDSHLSDTKENKSRIDTPPSTNCTHV

SEQ ID NO: 746 - DNA, 46181 bp, Mus musculus
tctcttagtcttgcctctctctgtctctttctctttctctctctgtctctctctgtctctctctgtctctctctctctctctctctctctctctcttgccctcttgctccctcctctctgcattcctttccccctctccccatgtggccaagaccagcctctacttctctactctctccctctctctgcctttctctgcctctactaccctcttagctccccttcccagacattccttcctgcaaaatgtatttaacctcaggcctgtcctgaggatgtaaggtttcactcatcacaactctccaccatgacaataaacaccttaaaaccatggactgcctcttctcatcaggatctgtcatgctggtgcaatggagcaggttatcctctaaagagcctgatctcccttgggaagtctctctgcattcccagctatggttttcaccaagccaagctgcccactgagcaagctaaggactctctcgtccccatcagaaccagccggagatttcctcctgcccttttcccttctgccctgggccagagccggctccctcctggcagttctactgggaatcaagactgcacttccccacccctggaatggggtcctgtggcttctcacagcctgccagatgtcagtggtatgatgtgcacacagtcaaacttcccacatcccacctccatgagtgcccctagccctgtactggacaggacactggataccattttaacccacagatgggctgagaagcacctaaagaaatgttcaacatccttagtcatcagggaaatgcaaatcaaaacaaccctgagattccacctcacaccagtcagaatggctaagatcaaaaactcaggtggcagcagatgctagcgagaatgtggagaaagagaaacactcttccattgtttgcaagctggtacaacaactctggaaatcagtctagcagttcctcagaaaattggacatagtattacatgaggacccagatataccactcctgggcatatccacaaaagattctccaacatgtaacaaggacacatgttctgctaagttcatagcagtcttatttataatagccagaagctggaaaaaccccagatgtccttcaacagagtaatggatacagaaaatgtggcacatttacacaatggtatactactcagctattaaaaacgatgaattcatgaaattcttaggcaaatggatggacctaaaaaatatcatcctgagtgtggtaatccaatcaccacaaaagaacacacattgtatgcactcactgataagtggatataaacccaaaagctcagaatacccaagatacaattcacagaccacatgaagctcaataagaaggaagaccaaagtgtgagtgtttcagtagtccttcttagaaaggggaacaaaatactcatgggagtaaagatggagactgtcagagaccatcccgtgagaaagcgagcccttcacaatctccctaacaggccaaatggcctcatgctaggagctggttatcactccctcctccctattcccttcctggcacctgaagctgtaaaagctgaattatagtcccctcttccctatctcttcctgaactcccatgccatccaaggacatgagttacgcctgagcccagcctgacacccaaggctgtcaaggaggatctatgttccagagataagatgcagagtgctcgctgcctggtgcctgacttcggcccccatgtcagcagatgcccacttctttgttctttgtaaaattccccctcgacccctcccctgttcccggagatatatgctttaaaaagaaggcacctcagcataataaacgagaccttgacaaatctgcttggtctcctgctttcttttccttcctcccatctccttccaggtttgcggtccccctcgcacccacgaataactgaatcccgcaggacgggataggagaaaaagtgcagagcagagactaaagaaaaggccatccagactgtcccacctggggattcatcccatatacagtcaccaaactccaacattattgtggatgctaagaaatgcttgctgaaaggagcctgatatggctgtctcctgagatgccctgccagaaacttacaaatgcagagtcagattctcacagccaaccattgcactgagtgtggggtccccaatggaggagtcagagaaaagactgaaggagttgaaagggtttgcagccctataggaagaacaacaatatcatcaaccagaccctcccagagctcccagagactaagccaccaaccaatgagtacgcatggagggacccatggctccagctgcatatgtagcagaggatggccttatcaatgggaggagaggtccttggtcctatgaaggctccatagatgttccagtgtaagagaatcaagggtgggaaggcaggagtgggtagtttggtggaggaacaccctcataaaagtagagggggataggatagggaatttcagggagagtgtgaaaccaagtagggggataacacttgacatgtaaataaataaataagaaaaaagaaactacacgctacatgttttttcatttgtctgtcttttttttttttttaacccaaggaaaaaagaaatgaactagctgaaagagcaaaagacagtcaacatagtacaaaccctgtgccgcctgaatccccaaaacacttagaatctgagactagggaaccgggcaattgcaatccataataccacttgaaagaaagaaactaaagtactaagattttagacaaagataatgacgctgtaatatccacaatatcttcaggacctgaggatgtgttgtgagctctgagcaggaagtgactttgtccctgtccctctctttttgcttttgtatttattacattttatttattgaataagggaggcacacaaatgccacagtgcatatggaaatcatggggggtcagttctctcccttcaccttatgcgcccccagggaacaagcttaagtcctcaggctgatagcaaatgcctttccccgatgagccctcttgtcagcacttagcacttgtatctatttgcatgggctgattttgctctacatactgtagagacaattctggaattttgatttctgttttaaaaaaacacagaaatattataagaatatgtcttcattttaatctcaagtgtggggatatggggcttctttgcagtatctaactatgatttgcctcatgctctagctaaggtgtgattttaccagctgcaaaacttttcagaagttatgttaagtactaggaccccaagaggcagatttggtgattattggtcattcaggggggaaggttgtggtttgctagcagtcatgctcaaagaagaaacaagttagattcagggtaggacaaaaagaatacgcaaaatagcaaagtccagctagaagcaaagaagaagcaagaggaaagaaattagattcacaaatatctctctcttctcttctcttctcttctcttctcttctcttctcttctctatccttttatctctcctatctagtgatagggggtgaaaccagggggatatagggtgggaaaaagaaaaacccacaaagtagcaaaggccagctacaacatacattcactgaaatagatcaactcagtgagtatacttatactctatccaagggtagtgtgacttcttgaggagatatgtaaaaacatccatttctaccagataatgaactgataaatgagccaaacacacacacacacacacacacacacacacacacaccaaaaacaacaacaaaaacctcctcatccaagtttatcttggtgagacaataaattcttggaattactttcaggtgtacagctgtaacttgaatttttttcaaagcctattttcaatgatgatacttaaacattttaacctctcttctagcccaccacccaccagagctagtggaaaagaaaggatatgggggaagtggatctgttttaaaaggttctttggagcaacttatgtctgtgttgtctggaaatcagcagttcagttcacaggttagcagcagcagctctatccacttgcagacacttcacgaatacaccagtagtccagttctgtaaattcagaacagcaagcatgaagcagcagtggttgcactgcctagcagagacagccaggcctcagccacattgtcatgaatcagcaggagggaccaggagggaagccaggaaaagttctcagctatacctctctcagcaaagagaagatcagagaagactcaagacctacaagtattacacagctagctctataaacaagccaaactcagcttctatcactgtctgttgagttctatttatactttctcatcatgggtgctccatgggtcttgtcttgccacacgtcttgcctcagctgtcagcactctgccaatcagcccaggtctgggcggcaagaagccacattgccaccagaactattttggtgcgtttctctctgtggagtcccgacaagcggaactcaattacacaatgtaaggcggaccaatacatgcatatcattagcaaagaatccttcatcacgtgtcctttcatgtgcttgatttagcagaatatcctatcacctgtgtctgcttcagtgaaacattccttcacgtgtctgctttagcaaacagtccttccacgtatatctgcctcaggaaaacactccttcgtgtgtttgccccaacaaaacaccatccggcacaattattttccaaagaacccttatgtttctacttcacacaagtggtggattgcttacagtaacgtaggtgactcagaggcagatggctgtgtcactggaaagcccacccagacatggtcgataactcacgaaagctgcatcattgaagtgccctgaacaagttgcaggaagctcctctgaaaagtctcctctcctaccttaggtgtttgctgcttctatcaacatggtgatgagtttcctgggtcttacaaggtttcatgggcttcctaacccttgtaagttaagtgatcttgatgagtttccttaacctcatgagcctccctccatcctccaagaatgtttcaatttattggaaacagctgtgcaacaactctgccccttcctccagctgttacactctttctatcctctcttctacagagtttcttgagggggtgataatgatttctgaatattctcttctacttatggctcagtactgtggcactgttccacagcaaaagttacttactctcagtattttgactggtcatcaacttctgcagtaatcactatctacaggaggaaaaaatctgcagtaatatgtgggtatacacatacttagaaggaaaaacagaaacagtagaccccctcaatcctataatctcccagacacagattttaccctggtttatagtaccaaatatgagttctatcctgtgaggtgggcctcaaatccaagcagaaagcagttggttgtgcctacaacagccatgccactattgagtgatggcacatttttgactggcatgtcaatagtataccacacaaggtccatagccaagcagcatcattggtcccaattctcctccataatcctacattaattccttcaagcactgcaaaagctagcccacaagaaatgagctttccgcttaatcctaatttgatttcttagcctcttgcaaccaaagcatactgttttcagttggagaaacttggcatttagttctgacatgtagcagtggcaatcacttagattgtatggggtcttcatgggcctccctggccaggaattgcttgagaggccatctactcctgacactcgtacttgtttaactcaacagctttgtgttcctcgaggtgcctcttcccacccactcggaatgcgttccttcaagctcttcaacttctatttttactgttcttccagacgcttttccaaatctgtacaacacacagtttaccattacataatacaaccttttacagagagagggcagggcctctgaaggtccattgctgtttcctctaagcaaatgctaattggtcttggaattcaatctaaagagatatttttaacgttagtgataaagcatgaaaaataacccatcacttgtggcaactgttttttcaaaatgcaatttagctacgaggatggggataacaccttattgggctctttataatcaatgatcattataatccatatgtcattcagtatcctcatccacatctccccgacccggatagctccatggggctggtctgtgatgccctgccctggacaagggaaagcaggcccaagctgacttgagccagctccctctaccagacaggtttcagactgcttccttggccaccacctctataatcacccctgatttctaaaagaactgtgtcctgaacaatctctagtcccagtaccctttcctgcaggagagaaatggacacaggatactggagaataactacccagtcttagcacaaacttttccacttttactgacatgtcaatcactcctcctttcaccccttctgtgaactgtcactcaggttttaagcacagaatttgtccaaatttgctttgggacaataggccccattatctgttctctctctctctctctctctctctctctatctctatctctatctctctctctatctctatctctatctctatctctggtttttcgagacagggtttctctgtagccctggctgtcctggaactcactctgtagaccaggctggcctcgaactcagaaatctgcctgcctctgcctcccaagtgctgggattaaaggcgtgcaccaccaccgcccagcttctctctcgtttttaacttatatttatttatttgtttctatctttctttctttctttgggggtgggtggatgctgtgacagtgtgtccatgtgtaagccagcagtcatttctgcccttctaccgtgtgggaccaggcatgggactcaggtcctcaggcttgcatcgttacccactggaccatctcaccagcccaggtttcccttcttctaacctcttcctaaattccttagcaccatatagacacaatctgtagtcaggtccattatggcatatcaaattttatgaagatcatgatgcaacgtcagactcaccaaaaccacttgccctgtaccatcctagaatggctgccgagtcaatgtttttatctctcctgtgaacagagtcccatctggcctgctaacctgggcatcaaaagcctagtcttgcacacacagttctcttgacaatgtctgccattcctttattgtcttctagttcccggaggctcttctagtcaaggagatggtgatagtaaggcattgctaattgttcatagaagtcatcgattacagccagtggtagtaaggcatctctaattgttcgttcatagaagccagttcattttgaatggtcgcccttacattgcctcaagctatgcagcctgtctgagagagagagagagagagagagagagagagagagagagagagagagagagagagagaatcagtgatatcactcaatttctccccttccacaaggtcaagctgatcttatctgcctccactcgggtcccatggcctcctaagccaggttttgagaagttcttctgttgcttatttaaaagtctctcccaattgaggcagtttaggggcaaaatatcccctgactagcatagtttcctttactgagaaactactaaggcttttctctccataccgaatcacttttttttttctttttatgtattaaatgtcagacctgaaggctgtcttccaacatttccatatcttctaacattttcctgtctcctcactcctccctgtctgattctcctcaagggcgaagatttttgagttctaggaagggctccctagcagaggactctttcaccaactaaaagaaaaggggaagagggggagggggagggggaagggaagtcaccatcctccttttccctccgttttctgccaaatcagaagataatatgggggatagcatctgtgtgtctattctattacaattcctccctcctgctggcaattcattctgggcagaaatctcagcctcggttacatctcttatggcatccggcagagaccatttccgtgacctgcttataatcacatgccatattgccactttcagaaattacaacatattctctagtccatcagcctccttgggggctttcctgtacttgaatcacaggccacattcataaaggggatatgcaaccatataccatagaggaagacagccaccctgggtttcccctccaagatgtccatcggcttcagttgcatgtcttactcatatcagacacacaactggcactacagcaaggaggcacaagttcccatataaccagagaagagtaatcatatacggattgccgaatggatgttccaccttcggttggatcatgcactgtagcctgtgtctcacacatagcagagggtcatgtgacccctcctctcagacacaactttgttttgtttctcccggttcaggcaccaattgtgactccccccccccccccccggggagatttgagcaagtatctctaatcacctcagataggactgagaacaaaacaaagaaacagccctcacaagtccggattagttctttgaggttactgacaggtgcacggatgaggggttatctgtaggcgtgggggtggttcaaaggcatttgcatacctgacagcccactctcagagcaccatcaatgacctaatacttttctacttggaccttctcaaagttgccaccacatctgcatcaacatactggagaccaagcctccagcatccgaatcttccgaggtcagaaccacagggattgggggaaaaaaaaataacaactgagccacattataaacgagtaagatctgacaagcattacagaagatggcacagacaaggtgaacattttctcaagtgcgtagagaggacacgatttaagtctctctaaaaatttctaagttaaaatcattcaaggtatttcctttctttttcaaggtattcttctctcatatatattacatccctgacagcagtttccctctctcctccctcccagtctttcccctcccccccttgcttcccccaacacctccctcagccccctccatccagttctcttccttttcgctccagaaaagagcaagtctctcagggatatcaaccaaacaaggcatatccagttgcaataaaactaggtacctcccctcataaggactaggcaacccaataggaggaagagtcccaaaatcaggcaagagtcagagacagccccctatcccactgttggaagtcctactagaagaccaagctacataatcattatatatatatatatatatatatgtatatatatatatatatatatatacagagcacctaggttagaaccatgcagggtccctggttgccacttcagtctctgtgagtgccccatgaacccaggctaattgattctgtaggttttcttgaggtgtccttgacccctttgtctccaacaatccttcctccacctcttctgcaagattccccaagctccacaggatgtttgactctggatctctgcatctgtttccatcagttgctgggtgaagcctctctgatgacaactgggctaggctcctgcctcaagtatagcagatttgttttgctatggttggtttgtttgtttgtttgtttgtttgtttgtttgtttgtttgttgtgtttctgggctatccagcctctgcttcatggctctccacacagtatcaggagtgggctccccgtcctggcataggtcttaagatggaccagtcactgattggccactcccacaatttctgtgtcacctttaccccagcacatcttgctggcaagacaaatcataagtagaaggtttttgtggctgggttggtgtcccagtccctccaccagaagtcttgcctggttacagaagatggcccgttcaagttccacgttccctactgctaagagtcttagcttacaaaagatattcttgtaagccaagtgtgaagttaatcacgacaaccaaaggtttgctaacatagaggaagagctctcatcaataggggaacagaaagtctcagcgacaagcttatgaaagaatggctgtctcaagggctccagcacccgactccgcctgtcagaggatggtctggctctttccacttgtcttctgcctcggctcaggtaaaaaacgtctgtggaaactgattgagtcactgagtgagttccttctttggaatgccttgctcctcttggtcaggttgactgcccagttctctattcagagacttagaaagctcaccgtggtcctagcgaactgcttcccgcagactgccacgggactgattcagagcaaacacttcggctgggggccaaggggaagggaagtgttttctgagatatggaaaatgagtctttgtaagtcaggactgttcgtgaccagcgtattgtggtacaaaaataagtttaagcgggaaaaagatctacaatttaactactgtgatactgtgcgacttcagggggcttcattatctttcccgagcttcactcttcgctcagatactgaaaacccaccaacgctttcacactgcaattaggaagggattgactgagcctgcttcttctccctgctatctggaaagctctcactgtctttaagaactcagagggtgcctatctggactgaagcgtagtgttctaaaacaggagatcaagcaatggctactaacacagacctagccccgagagaattcattgaagaaaaaaaaaaagaaccaataggtagcctagcatttattttattccagaaaatgagctaattattaaacatgcattacatttagatgtccataacgtgtttgtgaatttattctattaatagctacaagtaacttagactatggcaatttaaataatttttgaaaattctattagtcatcaggtagctgaaaaaaaccaataaaaataaaaacaaatcacttgactaaaactttcagtaacaaacacctgtgtgcatgcacacacacaaaccaagacatactgcagatatagagctatctagacaaattgacaacagaaagaaaaagaaagcaaggttcattaagtcatttgataaaccattcactaaatgaccactgaatgcatggcactgtgggcgtttcaggaactaagtcaacacaatttctgttctgcggaattaacgtcttggcagggaagataaactataaacaggtaaaatgtgcactggcttaggacaaataatcttgaaaaaataaagcaaagagagaggagggagaacattaacgttgcgtcgtaggctggacagtcaaagatagggatagaattaggatggaggagctgacacaggaggaaggtcggctccttttctgatctatttgttttatgttatcaatgcaatggccaagaggaaatttcctggaagcaggtggaaactgaggcacaaggctaaagctgggaatagagactacgtcaaactaggaggattaggaatgtggacagaattttggaaaatgcataaaagatgcagaaaaagatgagaattcttttactcccatccatccacgttgccttttcttagcctgattccagccagtgacttgagcttttaacctcactctgttacctctataaagctggataatttctgggtgtccctcctccacatctctgaggattcttcttttaacaagactgtgacatatcgggctcggtcccgtgtgcggatgtggatcagaagaggaaaacagagcctaagtaacagtttactgccacacagctgtggggggagggcttggaagaaaagaacacagttgactgcatctgccagagagagatgcaggtggccaaaaacccctcagtggagtggaaccgtgcttaccagggtggaaagtggagagtctggttccagggcagaagtaagcagggacaccaaaaataggagaacctctctggactgggtgttgaggaagaactttctggaataggtgaaatgatctgagacgttaaatagggaaggattctaataaagaagcatgggagggagatggaaaagggggagggaagaattcggagggattggggaaagacaagaccactggggcaagtttgtaggacaaagagatgctctctgagaagaaggagatgtctcactcactacaagttttcaggtaggtgagacacatcctgattccatatgagagtctcagctcaaaaataagccatattgaaaaacgtttgtgtgcatgtccggggtttacttgttccgtgtgtctttcatgactttttctctgcctttagtttttaagaccggactctcagtgaacttgaagcttgttcatttggtgggttgactggccagtcagccccagggaacctcctccccagtgctgagattagagcaatagatcagttcacttagctttttacttggctactgggatctgaactcaggtggtcctgcttgtgtggcaagcactttgccaactatgcattaccccagcccgcttcattccctttaactcattcccttggaggcaaaactaacccatccaccatgtgatgtggcagttgcactcttcaatgcacagcaagtacgcttctattgccttgcacaagactaggcctaacaccatcctgccatgtaggatgaccaatccttcgtgtcaagaccagtcaggcccacccctccctcaggactttgaagtgattaatggctggttggggaggatgagacattttcctaggtagtgtggccacgtgtaaggtgtccttgcctctgtacatagccctttatctatgctcctctaagtaacccgaagaaactcattggcttatcagaaaaagaaagaaagaaagagagagagagagagagagagagagagagagagagagagagaggaaggaaggaaggaaggaaggaaggaaggaaggaaggaaggaaggaagagtaagactgaattaactcagaagaaggaaatcaaaaggcgtgggaaggggttaagagaaaataaagagggtaaataaaatcaaaatatatgtgtgtctaaaaatatatgaagcccattactacatataattaatacatcgtaatcaagaaaacatttttctgaaactagcttgacatccaggtgtgatggtgcatgtttttaattccagtctaggatgctgaggcaaactgggctacatagcaaaccaaaatgggaaaatcccacctagcgaaacaatgactatacatgaaatcaagcaccctggtgagtctcagccgctcctccatgtcttctttcttcataggaatttgtcaaacattagtgtgtacatattgcttgaggattttattagactacaacgctgagagaggaagccctgactcggcatttctaacgaagcccggaatgatgttgctcttacccgtctgtggaccacacctgagtagcaaggttctgagatgtagtcacattgaaactggtgccagagaaaaacaggaactaattctctgggtgagtttgaaggaaacagatacaggtgctccgaggcccaggggagaaccggggctgtatgtatagataaaggaaaagtctgtgggctggctctaaaatctccctccctcccgcgctctcctcttccttctttagtttattttgcagctgaggatccaaactagatcctcaagcactctatcattctgtcactgaaggacctcttcagccatggtcctgaaatcttttgagtcaaaagtgtgagctgttctatggctaacagattgtggtctactgacttccctttcccctgagaactgttagcttctttgtaacaaacaactgtcaactgcatgttcaatcaagtcattttacctcataaaagactgagtgctgtttcacatcttgttgttaagctcaaagacaggtctttccatccacagactctgttctgtccccactgtgacctctagccttccaagcctctcagtttgggtcctggactccagatctatatcagcagcttcctttatgaacactaagacctttgtttctttgtttgtttttaagacaaaattcacatagcatgtgttctgcagccatcacatctattgcgctaaaatacccatcactcaaaaagaaactcagcctgggggtgtaactcagtggtagagctcgtgctgaattcaaggcctggggatcaagcccaacagaaagaaggggagaaagctgtattcgactcccaccttcttcctgtccccacctcctagccaaccccaatctgctttctgtgcccatggatcaactgaatgaaagcatacctgtagctgacctgttgtgtctcatctaacaaaatgttaaggttctgctgctaagataccataacctaacatcctttgatatatattgttttatactttgatgtaatagaatatacctatgttttttctttcattacttttgtttttgtagcatatctaaggatttgttctcaaattcaaggtcattagtatcaaccactatggttgtttgtttgcctagagcattgtgcatgctaagcaagtgcactgccactgagctatatccccagcccatcatttatgttttcttctccaagttttatagatttaactcttacatatacttgacatagtttgaggttgttttgttttatcttgttttgttgaaactgagactcacttgtagtcttggctggcctggaacttgctatatagaccaggctgacctggaacctatagagattattctgattctgcctcctccgagcgctgggagcaaaggcacgagccaccacacccaggtatagtttaagctggtgtgagaagtaggaacttagtttcattcttttgtatctgcatatccatttgccccagcatcttttcccccttttaaatttttattgatttatataatttttttcatttaacataaggatagcgatgaattctttgacatttcacatttggaaatatttagctgcctagggtttattgttttataactgaaattttgagtttggtaaatggacttgaacaattatttagcatcaacttttttcaacttaaaagctaaaactaaaaaatttaaaatttgaagccaggatcttacctataagtgggagcatgtggcatttgccttgctaggtcttggtgatttcactcagaaagttttagttccacacattttcctgaaattttcattttatttttctttaacatccatcaggtatatgaatgacatttgtattattcattcctatatttttggtcatccagcatgactccatttcatagctgctgtgagcagagcatccgtgagtatagatggataggctctctgtggtaggatgtggaatccttcgggcacacgctcaggaatgggactgctgggccatatggcagttctagttttagtttttttgagaaacctccactccacagtatgccagcttacactcctcctaaccgcagacacagcttcctcgttccccatatctaaatcagaatttgcaatcatttgtattcttcatgttggccattctgattgatctgcaatggaatctcaaaatagttttgattttcattgccctcataggggaggatatgaacacttttttaaaaaattattaatattctgtatttcttttgaaagtctatgattgcttcaacagcccattttttgattgagttgtttggtttttgatgcttaggtttgtttggtctttattggggggggggtattttgcttctttaaatattctagatattaatcctctcttaggatatatagctggtaaagattttcttccattttcttccattgactcatctgttatacagaaacttttattttctctgaaagttccatacatcttgtacaatgaacattgattacatccactcatcactttcttcagttccccatatgactcccaccccatccatgtacctccctctcagctttacatcattccctcctccttccttccttccttccttctttccttccttccttctcctcctctttcttcctcctcttccttcttctttctcttcctcctcctcctcttccttcttctttctcctcctcctccttcctccttctccttcttctttctcctcctcctccttcttctttcacttcctcctccttcctctttctcctcctccttctttctcctcttcttcctcctccttcttcttccatttaggttatcattaatgaccccctgagtccaattaatgctgttcactgcaaatgagtgagtgactccgctccctcagcagccaccagctgccttcagcccctctgatatgggtaaaattttgactgacttcccttatgcaggaaaccatagttattgtgagttgatgtatacaacactccttttgtgtctacaagtcagtatgtcacagctctcctccttgtctgccagctcttgcattcttttctctccctcttctttgatgttccctggaccttgggtggtaagaagctgatataaattacccactgtatccagagttatttaaagccagtactttggccagttatgagtctctacattaactagctgctgcaaaaggaccaaagctgagagcagtacaagtctctaaacacaaatgtttagaacacagtttgacggcatgagcatttagcaaaacatcaatggtaggttccctcttcctagcccagaacctatgatttaaaccatcaaaggcttctgaacaggtttacagtacaaaaatccttcctgtggagaaggccctccatctcattaaagaagttggttacccccataaccttcatgccactattgaaccagaaggtgtatcttaccaaaatatcagtgttttagcatctaggggccagcactgggagggaccatggatatattttctccttgcatagcaccttctggcaccatgtaagttagctagcaggaagagagtgtcctggtgagttagaggtcggtttctctatgcccgatatccaaactgagtggtaccttcagcaatagggtctaatcatgttgttatgatgggttaccaagagcaattgtaatagcctgtgtgtttgaggttccaagagggcctccctaaccaaaaactcatatggggtatccatgtctggcactgagctgtttttgtggggtgatggtgtttctgtaatccagctgcctgctggaatgttgatggattttgttggcttagccttctctaagtgtccatagcttgcttctgcaagtatccgtagcttctgcaagtgtccgtagctgtggtgagcacatgagtgaagctgtgatgtcatctgtaaaaaaacagcttttcatagagcccctccccattctctatctcttacatcccttccacatcagcttccctgatgtttcctgagcctgtggagctgaaatagatgtcatatttagggataggcactcgagcatcattcattctcaccctttgactatgagtcattgcatcaactcctgcccacaactgaagaagcttctctgactaatgttggtgctatctgtgtacctctaggtatgttattctttgggatattatgtaagtggaatttgtttccttcctttctcttctagattgttcttcaatttttagtgtagacaaacacaagttagtttttgttggggttggtttttttgtttgcttgctgtcttagttagggttttactgctgtgaacagacaccatgaccaaggtaagtcttataaaaaacaacatttaattggggctggcttacaggttcagaggttcagtccattatcatcaaggtaggtgcatggcagtatccaggcaggcatggtgcaggtagagctgagagttctatgtcttcatccaaaggctgctagtggaagactgacttccaggcaactagggtgaggatcttatgcacacacccacagtgacacacccattccaaccaggtcacatctattccaacaaagccacacctccagatggtgccactccctggtccaaggatatacaaaccatcacattccactccctggtccccatagacttgttcaaaaacatgagtctatgggggccatacttaaacatagcataatgcaaaatgcattttaggccaactttcaaagtcctcatagtctatagcagtctcaacaatgttaaaagtccaaagttcaaggtctcttctgagattcattcaacttaattaactgtaatccccaaagcaaggcaggaaaccagctgggcagactccaaactctgcatctccatggctgatgtcaaagcggtcttcagatctccactcctttttcatttttgttgactgcatcaaactgctttctcctgggctggttccactccctgttagcagctttcctcagcatgtatcccatggcgctggcatctttaacatctttgagtctccaaggcaatttcaatgctacagcttcttgtttcagtgtctgagattccacttgatcttttggactcctcctaagggctgacatcacttttccagctctaccctctgtagcactctaagctcaggttgatccactccactacggctgctgttcttggtgatcatcccattgtactgacatctccaatacattggggtgttccactccaactaggcttcaccaatagcctctcataggctctcttcagggtgccaagcctcaaatcctttgcatgaccccttcagtcctgggccatcaactacagctgaggcttcatcttctccaatggccttccctggcctctcacagtgctaagcctcagcttctctccatgatcccttcatttcttcacaagcaataccacctgagtgactcttacacattaccaagtccagccacagcatgaggtacaaccttgggtatctctggaacacagcttctttgtgctcccagaaaacaatttccagaagatttcacctcagtgatgctggtcttttcttaatcactgctaattccttagctccagctaaccagcatcaattgtcccagtagttccttccattcttaactctagagccagagccacgtggctgaagctgctgagttctgctgcttacaggaactagaacatgatccccttgtactattacattatcactagctttatgttttctaaatccttcactgcctaagcttggctatcctggttcttgctctgtagattgaccttgaattcagagatcagcatgactgtctcatgggattaaaggtgtgtaccaccatgcctggatataattttaactgggtaggatcttgccccaaagtcccactcccttaatctgttatctcctagaacacaggattttgcttcatttcacttcctggtatgcctttaatacttgaaccatatattttatattttgcctttctaagcttgctatgcttgttcaaacttctctttgtgagacttaaccagagaacaaagtctctgctgggcttttttaaaacttcctttgtcaatgcagttaattcaattaatccaagtctcttcaccttagcctcaggcagacttttcagacaagggcaaaaagtaaccacattcttcaccaaaataccacaaaaacagtctttatgccacatactgaaattcttctcttttgaaatttcttgggccaggtaaatacagttcaaattactcccagcaacaaaatcttccatattcctactaggatggcccattaagccccatttaaagcattccactgagttccaaatccaaagtcccaaaagccacattctttcaaataaaagcatggtcaggcctaacacagcaataccccactcctggtaccaacttctgtcttagttagggttttactgctgtgaacagacaccatgaccaaggcaagtcttataaaaaacaacatttaattggggctggcttacaggttcagaggttcagtccattatcatcaaggtgggtgcatggcagtatccaggcaggcatggcgcaggtagagctgagggttctatgtcttcatccaaaggctgctagtggaagactgacttccaggcaactagggtgaggatcttatgcacacacccacagtgacacacccattccaaccaggtcacatctattccaacaaggtcacacctccagatggtgccactccctggtccaaggatatacaaacaatcacacttggtgagacagagtttctctacataaccctggctctcctggaactatgtagaccaggctagccttgaactcacagagatgcacttgcctttgcctcccaagtgctggggttgaaggcatgagccaccacacccagccaaactagttttttttgttttggtttgggtttttttttttttcgtatgtgtgtaactgggtgacctgcaactttgttgaattcacttattaattctgtcggctttggtggattctttaggaagttctgttaatatgaccatagcatctatgagaaggaactgctttatttacttgtttattacaattgatatggctttcatttctttttcttacctagttgctctggctgaaacttccagaataacactgagtagatgcggtgggcatgggtatcatcttctcccaactttaactgaaagctgtcagtcttgcatattgtcttagttagggtttctgttgctgtgaggaaacaccatgactaaaaaacaggccagggaggaaagtttattgggcttacacttccatatcactgttaatcatcaaaggaagtcaggacaggagctcaaacacaactggaacctagaggcaggagctgatacagaggccatggaggtgtgctgcctactggcttgctcagtttgcttttttatagaacccaggaccaccagcctagtaatggcacaaccaacaataggctagcccttccctcatcaatcactaattaagaaaatgccctacaagtctgcctatacccctctcttatagaggcgttttctcaattgaggcttttttttttctcagatgacttcagcttatgttaagttgacataaaattatccaccacacatattaagtagaatgttagctgcaagttttcataaatgccttctgtcaggctaaagatgttaccttccattgttagagtctcaaagagtgttgggttttctcaaatgccttttctatatcaaatgagataatgtgtcttttttcttcatttagttaatatccatgtattatcatgttaatatcaattgtttttcatgtttaactactctgacatttctgagataagttttacttaatcatgatgtataacctcatagtatgcagtttggttctgtttgttggcgctttgttaagaattttcccacaaacactcagtttagcagaagttctgaacctatgggtcatgactattgaaaactacatatttctgatgctcttaagaacctgagaccataaatgtatgttcattgctatttcctaactctaattttgctactgagaagtgtctcagttcctaaggccttcagatatacgtgtttttcaatagttgtgagaagagccaagaatatcttccttccggacctgtcagaccaattcatcttgtaactttgagatcaagccatatgaggtgtctagatctctcccttcacctataactctctagcagaaaagacccacctccactcaaaactgacctcacttgtgctcctgaaccctactctggcttcctcctcagaaacagctctatgtttttaacattcctttcccaccatacctttaaagcccttctccgtgcactgctccccctttctgtaaatttactaagatcccttgccatcctaatgacctcctctcctccatcccacctccccctaaaagatcttctctgggtttctcttcctttctctgtcaaatcgcttgataaatcagcccccactttctttctgaactaattgtctgggaagttaaacagtccactgtgtcccctttggctatgaacatacacaagccagccatctaagttagaaacatcccggttttggtttcttctgacttgtcattcttttttagagccaacctatgcctacctatgccttatccttcctagaacactgtttccatatacttctctacttttccacagtactgtacatttgccatttatatcttacaaagtcaatccacactgctcaagtgaccctttaagattttctacattctgatctcagtctgcatagctttcattattagtgtgtgtatggttgtggttttgagacaaggtcttatatgtagcccaggctagcctcacattggcaatcttctgcattagactctttatgtattactaggcttggattattggtttattcaaaaagtttaactttatcctataatttacttagttctgtgctaattgaatgggtaaaaacctagaaaacatagctctcatgccatattctcggtccaccttcatatgcctgcttctggtgtggatctggggaacacatgcgttgtatgtataaacaggatagttctgatttgctgattctctatctgatggagaagcctgaagcagcttctacagaaataaaaagctaaaccagaactcatgttttcagagacatgtcgtccattgagtggaaaataaaaagtataagtacaatattccctgatttgatatcaccagagaatatcagcaccttctccatagtccaagtggtccatagagtcccaaatgggacataccccttcccaacaccaagtaccctgccacagccagagccaccataaagcatctttccaactcctactcttctatgctggctctactcttccacatttactgccagcagagcaatttgatgtcccagaacatcggtatccaagccaaaggtgttggcccagtgtgattaaaagcatcagtacccaaaccaggaaaaaatttccgtgtttcctctgggccaagccatatatcacctggtggtttcctgagcatgcgcagtaacttctgatattcatgcaccatcagcatgttggttcaaatctggttttgtcattactttgttttatacctgcagagaattgctactcccttatgttctttatgtccatgtacctctctgtcctaacacaggctcccttctccttcccctgcaccagtgaaaatttccacaaatacaagcaaaggcaaatcagtatttcaatggtccttcaaagataagtaacagcttaccatgtgaaaatgaaggggaggagcttttcagacagaagtgacagcaatgcaaaggaagcaggatcatctaggaaatttaccaatcactgagcaatgggaaagtccctgttgctatgcagactcttcctataacattgcatcttgcggcttgctcatggataactgtccctggcccatcattcactatagatgcctccatagaacacatacatccctccatccactcattatctattgacttgaaactgtgctgagccataatagtacatgggaaaagcatcctgcctgctctcgtttagcaagaaaaggaggagatgctgtcagaatgatagtcaaggagaagagcacaaaacataggcagtacaatagtggtcctaggaaaatgcagaggcagacctaatcccaagccagtgccccacccaccacaccatagctactcattcacctgtcaggcttctccatcagatagggaaccagcaagtcagaactatcctgttcatacatacaacgtatgtgttccccagagccacaccagaagcaggttttcacccattcaattagcacagagctaagtaaataataagatacatttaaactttttgaataagctaataatttaagcctagtaatacataaagagtctaatgcagaagattgccaatgtgaggctagcctgggctacatataagaccttgtctcaagaccacaaccatacacacaataataattttgatctataaaattaagagaattggaaggaatatgctagccggtgttgcaagcattcctggtgagtcctgtgaccactgagaaaatacgcccagtgtctttattcagagaaggtgaactttaacatcctggatagagactttctgagagggggactagggatgtgcctaatcactcaccatgaaataatctgaggctcatcttgtgccaggcacttctcaaagatgttccaggatgtcccttccctatgtgatgcttacacttctagtaaagaggacaaaacaaaaagcaaaagcagaacaaaacaacaacaagccctcacacattcttaaagtatagtgattgacatagaggaaaataaatccaactgagagtgggtcacaagaatgggtaggagggttggtagtgaggaaagcgtggtctcagaagacatcgttgaaagaaacatttgcattgaagacattatggaggcaaaggtgttggtcacatgattgcctggaagaagtacatgccagggatgtattaatgcagagacagctcaagaaacccctgagttggagcaaactgaataggaagtcagtcacaggagttgtgctggaagagggagctggccaaatcatctttgtccattataggtcaatataatgattttttaggtttgattttgctgttatttttattaaatgcaaagagaagccataaattctgagttattagctcaatgaattctgtgtattcacacagaaagatgaaagcaaagaacactcttctcagcaccttaaattccccttagagcgtctcttactcactgccccttcttccttcccaaaggtaaccttcctcctgatttctgacagtacagatttgtcttgcttgattttaattttaagtaaatggaaaactacttggggcaccttttggactcaagattttgctagttatattttactcacatgactttgagaggaaagagggggcaaaatggcaaatagccacgtgtcaaaaggctgatgggaaaaggggatgtttgacggcaacactgacgtgcctggtagccatatggcaattcaggaaagagagcagaagtgcaggctcatgaaagagctgagtgagtgtcaggaggcctgagacaccagctctgggccaccccataactacacacacagctgcaactcttccttggaaaacaagagactccaagaaagctgaagtcacaatcatggctcactgatagtcaaacatctccacagatcataacatgtgtgaaacactgcagagtactaagtggtaagtgctgggtatacaagaatgaccacagggtggtcagttaaacaagcaaacagagccctagatagcagagtaatgtgtgctaagagcttagcgttgacgttaaaggagcgtcctctttaagagttgtaacaatgatggtacccccagtaaacttcctaatgaattcttatgattgttatcaggctttactgggattaggctaaagttgttagtacacttataaaaggctgctataaaaataaataaataaataaataaatcaaaggctgctatggtaacactaaacctaagcggtctcttttccaaaataaaaaataaaaaataaaaataaataaaaaaagagttgtaacaatggggctggagagattcctcaacagctaagagcctgggttgctctctcacaggacttaggtttgattccagcaccaacacagcaactcacatctgtcttactctaactccagttccagggaatccagctcccttttctggcctatggaggtaccaagcaagcatgtcgtacaatgacatccatgcaagcaaaacacctatacacacttctttttaaagcctgagtttgaatcctggctctgctagttttaaaatgtacaaccaaggaaagttggttaatctctctgtatctcagtctcttcatccataaactgatattgttttgatctgtctcacagactgttatccccatcaaatgaaataacgcatgcgaagaactgcatatgcagtaaacccctgttactggctctctgtgctgcataatcatggtgcatggcacatagacagacattaagttcattgtaaatgactagctgtgacagtactaccatcagcaaagccttgcaattgttggagtttgtgccaaaggggtcaatatagttcattatccctcacagattgttgccaaaagatttcaaaggctgaggtcacaaaagtatgaccagccagggaagaaggagaccataagttaggatcatctaactagatcaactgcccattagccaagtctgccagatactttgcttgaggtagagccactaggagtgtaattgtctactgcaacatttccgaacactcctccccacttcttccttcatcacatctctggccttcttccaaagagcttaaacagactggcagaattaagagaaaggaactaggaacagaagggggttatcagaaacagctctttagccctctccttctgtgtttacagggagtgaagtttcacagagcagctcagacccccagctaatgaatggcgttctaggagagtctgcagttcttcctctaaagcttcctgcagggaagatagccaatatcatcatctggaattatgaatgggaagcgtcacaagtcactgccctcgttatcaacctaagtaatcctgaaagtccacaaatcatgaacactgatgtaaagaagagactgaacatcacccagtcctactccctgcaaatcagcaaccttaccatggcagacacaggatcatacactgcgcagataaccacaaaggactctgaagtgatcaccttcaaatatattctgagggtctttggtgagtccaaatacgtcatttaatcatgtacaaactttaaaaaaaaaaaactgtgtgtgcctacgagagtgcacagtagcctagtgctaaagatgatagcatttggcatcattaatgaagtccagaagtaaagcattttcataacattgcacagctaaatagcaacagagctgagttaaaaactaaatcttgtggctctctctacaccaatcacctcactttccctttcaacaagaaatgtacagttagtgcaagcaaaatgcttaatataacaccattaacatgcacaattaggtatctgtcacacactctgctcttgcgaggtgggtatgcagaatccgatgctcagagaatatccttagtcatggtctcagagatggtaaatggtagcacctcccatgtaactgacctatctcactttacacagacatccagctgacttatcagaggtgttgccttagaaagtactctgcacaggtgagccaattaacagaaaaaaactaatagaaaacttaatataaaaccttttctatcaaggttacttaatttctaatggtattttctccagatgttttatgttgagccttaatcaaaaaaactgtctttctaactggagggatggtacacatctataataagcctaatatttgggaagttgaggcaggaggatcaagagtgtgaggccagctttggctacattgacagactgtctcaaatacattggtctacctccctaatattaaagaatgaaagtgttttcaacttaaaagtatagaaacaataatgagatactgtcttaatctaaaccatgaaaaatgtagctaccagagatgctcagcaatgccatggactattttacagtagacccaagcattagattggctacctaagggcagtgagatggcccagtaggtaaaggtgcgtggtaccatgcctgatgagctgaatttgatttccagggcccaggtggaaggagagaactgacttccacaagttgtcctctgcttccatacgcataccatggcacttatgcacacgtgcacgtgcgcgtgcaggcacacacacacacacacacacacacacttataccataccagagagagagagagagagagaggtaaatggttaaattaactatatgttagctggtcatgaaggttcacagctttaatctcagcactttgaaaacagaggcaggtggatttctgtaagttcaagaccagatataatctacatagtgagtcctgggagagctggggttttgcatagagacactgtctcaaataaataaataaataaataaataaataaataaataaacttacaatatgccgtgagtgctaaggaagaggcatggagcaacagggtgacaagggacagggcaggaaacttggtgctacagaacaaaactaggccctgagcaagctgcacaagtgctctatcactgaatgtacaccaagcccaaggaattgttttatagagaaagcgatcagcacaggcctctattgaaaacataacatgtgaggtaagctctgttggtgttaagagaataaaccatgcagatatctgggagaagagccactcagaacaggtagcaaagtctgcattcaaagagcatcctgcaagaaggctgaacatcaattctccagattcatgtaaaaatctgcgaatggtgacaagcatctgtgatcctagctgtggggaagaagagacagaaaccccctctggagcttgttgaccaatgggtaagttcagtgagagaccctgtcccaaagaataaggtaaggagtaatagaggaagacaccctgcaccaacctctgacctcacatgcatgtgagcatgtgcctataccctcatgcacacatactaccatatacacacataaacccatcaaacggaaagacggcatggtgagggatgttttttcacaggttgatcggcaaagccatgtgtccttaactgaggtcttttctttttatgtagaacgattgggtaacttagaaactaccaactatactctcctgctagagaatgggacctgccagatacacctggcctgtgttttgaagaatcaaagtcaaactgtctcagttgagtggcaagccacaggaaacatctctttaggaggaccaaatgtcactatcttttgggacccgaggaattctggtgaccagacttacgtctgcagagccaagaatgctgtcagcaatttgtcagtctctgtttcgacccagagtctctgcaaaggtaatgtgggaactaaaaacggggggccctgggcaagagagggaggaaagaaccacatcctgccagagttccacctatgctctggacaggcagatgtgggagggctgccagatgctttccactcagccccaggtgggcatccaagcctctgacccactcgacagggggtgaacaaggggcagcccaacctgggagccctggggctactccctaaagccctggggttatgggagagagggatgagggaagagaggttcccacaccggtgagagtgagcggatcttgatgagaagagactctctatggttttagagctttattttagaaaggcagggagaaagagagaagggagagagagagagagagagagagagaaagagagagagagagcaaaatctagagagaaagagagtaagagtaagagggagagaagaaaggagagaagagaggacaaagaggagagaggagtgagagaagtgagaggtaagagaacaaaggaataagagaggaatgagagaggtgacaaagagaagacaaagagaggagtgagagggtgagagtgaggagtaagagatctaggtggggccaagcagcctctcttatggtctttactgttgctaggtaactggggaggagtttagcctgaaggtcagaagcttgggacattgccaacgtgacttctagccatgcttctcttgtgggggctgtggggggggtggtaactttggcaggagccagagttccaggagcatgagggaacgcctaccgtgtcatgtaggtgaattatcacccttccggggttcagacctcagctcgactggagaccagcctgcctgtgcatagcccaatgccccacaaggtaacatctgccttgggtcttcctgggaccctcaagcagctgggtagtattatagtgtggattcacaagactgcctgaacagtggcagttggagcagccagactgctgctgagaggaacgaacagggaggctctagaactctctgcctctattaatcttctttccctccccaagtcctcgtgcaagagcaagacctcaggagtcaaaatggctctctcctacctcagccaggccatacctctcctgcatctcagaaagcctgacagatccccagactgcgagtagaaatggccatactcagcctctatagacagcccagaaggactgaagaaatcctctgagacaaactcaaaggatccctcattttatgtatcctaggaagttccacttcctttttatttaattcttcttttcaggggttctaactaatccaccctggaatgcagtatggtttatgactacaatttcaataatcagtgcagtcatactcatctttgtgtgctggagcatacatgtttggaagagaagaggtaagttccccttctgctttcttctatctgctgtaagattgcagctgtttagagtctggggcctctggttgccaggggtcaagggaggatggacacaacttctggctgaattagtccactgggatgatgcccagcatgtgaccaggtttctgttaatacataagggaggtgtcctactgagaagagcagtacccggcctcgggatccacttgctcacttgcccttcatttgggttccgttgcctgcatcctttggaaagatgcctggtggagaaggatggaggaaatattctctcaccgaactcatgtgttccaccttcctgctttcatttcccaggttctcttcctttgactagccaacatccaggtgagcatgcagcctctaactacaaagcgtaaagcagacaggaagaggtaaataaaagagaagaggggctggccagagggataaagagtgagcattactattcatctggaccctgtggtgtcagaaagactagctggtaaccacgagacctacagcattcctcccaagtatgtgaggggcatcacactcttctagagcaaggtcaagatcactaacttcctttctgatggagaacacaagtcccggtgaaaagggtccatgaaccacacatgcactgtcacttggagcataaaacactcaaaactaggctctgtgactccgccactgagactcaaccaaagttgagacattggatagatgtgtgagaaagagatgtagatgcaggttcgttttctgagtctcgtcccatgggtgatagtttcaagataccattgttgaagagagggcatgaggtcagggatcagaagacctgcattctcactcctgtcccctcttcctaagcgactctgtacaagtccactaagcacccttgagcccgaaattcctcatctctaaaattgtcaaatctgtcagacggggctgtgaaaactgtctccagagatctcgcagactgtggtatttagtccttcaagtgtgttgacatgagggaatcactgagactctgaatcataagaataccacccacaccctcacccaagaagtgaggttagaaatagaccatacgatagttcttgttcagcactgaactcaaaagattgggaggtggagagagagtccttaaaggggggtcagtcttgaaacaactgctttgcagggggtgttctagaggccagcaagacacaagatcctgtgcatattcaccccagagtcctaccactgacagctgtaccttttgtgtgtgtgtgttaaccatacagagtcctcccagagcacagatggcccaggctctccagggaacactgtgtatgcacaagtcactcgtccaatgcaggtaagtcctctcagctctgttctccactgttgctgttgttaccgtgaccccccccccacaagcacatcaccataatcgtcagccttctttattggagaaggcaaccacagagctgacacccagtgtctgccctgatggcctttaagataatgcttcccctcgctcgcttcccagtgttctctgtctgcttaacccatcaggcagtctttgtgcttcagggttactataacctgcttgaaaatacaagttagagactctccttttcccttgccacatttgactagatcaaaggagatcataagctgggagggggtgtcatccaggaagtagagttcatgagaacttagagtagtgtctcaagagagaaggaggccaagtatcacaagccttaaacaataaagggaacgagctacagctatggaagagaactctcacatagtaggatggccttggtcacgcgccagggtccccactacccatgaagaaccattgtgggggcacttttctaaaataagtagatagactggggagccaattctcaagtcttctaaaagaaaaaaaaaaaaagcctaaagaacttggcattcttttttttttttcttattggatattttctttatttacatttcaagggttattccctttcctggtttcccctcagaaaaacaccctcccaccttccccctgctcaccaactcacccactcccacttcctggccctggcattcccccacactgggacatagagccttcacaggacaaagggtctctcctggcagtcttgaaataatggaagtgaagcaacggcccagctaaaaggcttggattcctcaagcaaacacctttctccccagctgacgcaggctttgtggggcaaactcctaaaggagaagactgtgaggggcagtcacgctttttgcccatttactgttcccaactcctggtgggagcatgctcaccaacaacccaaagcagggatcatcagcccatatggcagctaagtagctaaatgtatgtagagatccacctaggacctgggggtttctgttgttactactgctttgtgcatcagagaaccattcactttgggttttctttccttttgttcattaatttacttatttgcattcatttcatttcttttacatcccaatcacagcttccccttcctcctctccccctagccccaccccctcacgcccccgattctcctccccttctgtcagaaaagggggtcctcccatggatatcgacccaccttggcatatcaggttgcagtaggactaggcacatcttttcctgttgtggccagacaaggcagcccagttaggggaaagggatccaaaggcaggcaacagagccagccaatgctcctgctgttcggggtcctatacatctgttacatatgtgtttggggcccaggtcctaaacgcatgctctctggttggtggttcttaaaaccggtagttcctatacttctggttccccactacaccatggtgactagaccattagaataacagggataaatgggagcaggcaaagtaggtggctccagttataactagtaaagactaagacaaaagatctgatgcaataaccatctagcatgtaagcttttatgtatgcttaaaggagcaagcatggaatcagatgcaagacaagaatgcttttatccctccacactactctgcccttcggttgttctctggctgggcctttacattgctgggacattgatattctatttaggttgtttttctgtttcttggagaatgttgctaaaacatcacaggtttgaactggtagagcttggtcctaggctcctcttggcatgacgcttcttccttccttgcttcttcctgtctttctctctttcttcctttctttctctctttcttcctttctttctttctttcttgctttcttcctgtctttctttctctcttcttgtttttttttcttgtcatactacctttccccaaaatacttgcatgcacagacctctttgtttctgtgtgagccaaatgagtattattcttttgtttgtttgtttgtttacaggaaatgaaaatcccaaaacctatcaaaaatgactccatgacaatttactccatagttaatcattccagagaggtaaatccatgactgctttgttttcttgtattgtgtatgcctgcatatatgtgtgtaatgtatgtgtgtggtttgtgctcatgtgtgtgtgaataggaataataccatccagtgccctgttccaccattccgtctgactcccacaaaacagtgcctctcactgaacccaaagctaaccctgtgtccagaaagctaaaaagtcctccttctttgggcccctggagtgttggcattacagagctaggaaagctttttacatggggactggggatttgaactcgaatcctcatgctttctcagtaggcactcttatctactgaaccatcttgccagccactatcttcttgtatttttgttcctctcccaaacttattatcttgcaaataaaataaaaggtccattttacagatatctaaataccactagaaaaaagaaagtcttagaacattaccaaactataaaaagatatcttgaggctggtgagatgactcagtgggtaaacggcagctttcaacaagcctgatgacctgagttcaatccccaggacccacagtgtaggagaaaacaagctcccacaagttgttccctgtggcagaagcatgcaaacacacaaacacacacacacacactcacacacactaaatagatacataaataaataaatagagaacattttaacttaccttgtattgaggtcacctgttataaaattacctacttattttttaatgtagccctgcctcacgccatcaatagctagccctaccatctaaccatcatggctttcatgtcctctctgcagccatggagggaagggtatggctctgacctctattaatctacctcatttctctcctcataaaataagcccatttctcctaggccgaatactcttaaagacatcaaattggcgaaagactttaaagaaatccagggagaacacatctactgatcccttggaagagaacagaaaagaagcgtgctttccaactggcaatgggatccggatgcccagggttatcacttcagcctggatccttcctacaagtgtcagactcttcaggggtagcaagatctgtagtacataaccccaaaactacattccagtcagatccaggacaaatcctgctttgggtaactcatccacatgctgctttctctctgacaactaaacagtcagagttctgatggacagattgattccgcaagtaatcacttctccttctagaaggcagcaggatgtgattggctgtagagagagcacggtgttttggttaaatgtgtagtatctggcattggatggaccacactcatgccctgacaaatcatttacttagacaggccctctgggatattttctatgttcttggacctttaatctcacagccaataagaggaggatagcgatgcattgcttccattgctcacaccaggaatctaagccatccatgactacagtttatccccaaacacttcagactctacctccaatatatattaaacagatctctctcttttcaacttgtagaccatcatcctatctccatttctcccatctggaacctgaggtactccaattatctctaaacatctcttctaattttgctcttgtctctgcattacccatggtctaaaagacaaccagcacaatgtccttagtatagtcccactcttcctattgtctgcctgtacccttgcagactcctcatcacagccagtgtgaaagccagagttcctggctcaggatggtctgccacatccccagactctgctagtttcactctccccattctctgtttgatctctgtgaccttttagctcctctatcagagaagaaatttctccatagtatagtcacttacatctgccccaaagctcttcttctgcctgttgggttcctcctgtactttagacctcaacttaaatacatcatcttctataaaagaccttcccagtgcagtctacctaaagagggattccttattagtctctttaacttccatgttgtttatcacatgatattgaatatttatttttaatatctgtttcccttattagaggataaatctgtgggatcagagacaataactattttattgctgtaatcattaatatgtagaacattgtaagtgttcaaacaatacctttagtaaataaatgtatacatgatggattggtgtgggaattaaatgaaacaatatgattggctctgcaactgtaggtctacttctgtgtattctataactgcaaactgaaatatttgacaaagaattgtatctatactaagtatatacatacttttttcttattattcccctgagatagacataggttctatagtacccacctccattttatatgaggaattggcatctagggatagcctagaaccatcttccaggaacaccaagggatgactataaacctgaaccctttagcctagtgcctaacacattaagagagccaaagacatgcatgcacaactactagttttgcctggtgctttgtgtcaaggcactcttagaatcctaacgcttgggagatagagtcaggaagagtcaatgttgtcctcagttatacagaaagttcaaggccaacctaggttgcataaaaccttgtctcaaaaaaaaatcttattgccaacgttgttattatcattattaaaatttattctcctgaatcacagaatcttcataaattcctttaacagctaagagtcctaagttcaaggctagcctgggttacataggaagttctgtgatagtcttagctacacaagaagactgtcacaaaaagtaagataaaaggctggagagatggcttagtggttaaaagcactgactgctcttccagaggtcctgagttcaattcccaacaatcacatggtggcttacaaccatctgcaatggaatctgatggcctcttctggtctctgaagagagcaacagtgtgctcacatacataaaataaataatttttttaagtaagataaaataaatgagaagagagaacgtccactacttgaccacattcatgccatttcttgccttgtctcaagtttcaaatccgattagtttaccccatgtgaaatgcatgctcccctgtcctaaggaacatttttggagggagaagaaggattgctgctatttcttttagtatgttttattcttctcaaaaaatagcacatgtgcttatttagaataattcacacactccaaaacaaaacacctctacaatagccaagataactaccattaataatcctatatgaaaatagcactggtttttaccaatataaaatcttttcataactttttcttggctttaatttgtttttgtttttattttcatttgttttaacttgttttgtttttgcttaacaatatcccttaaataactttctgaagtttggatgtataatcctactgatcatctttgctccttttgggtttcaattttatctatacgaatagttgaaaatcaagcaacactttgaaatgtgtgtatatcagaggcagcccatatcaaaaaacagaacccaagatgccaagaagcaaggatagtggcatcgcaatagaaaagatctaaagcaatggctgtgaacaacagaaggagaaaacaaaattcaccaaagttagttaggtcttttttattttggttgttagatcattggagaccgaatcttctgaggcccggaaaagccttaagctcactgtatatggactcctgatcctcctgcctccacctgcccagtgctaacattataaattcatgttgaatcctggctactaatgacattgtcagctaacaaactaggataaatagagaaaagttcatcaggaagaaaggggggcttaagaaatagtcgtggagtcttcaaagaagggaaaaggaagaattcctataaggccttacaaggtgccctaaagcttagaggaagactcattggacagataggaaggtaccctcctttatttttgacatttatgtgtgtgcatgtgtacttatgggacacgtggagtcagaggatctcttagagtttctatttctgtgacaaaacaacatgaccaaaaagcaagttggggagaaaagggtttatttggcttacactttcatatcattgttcatgactgaagggagtcaggacaggaactcaaaggggcaggaaccttgaagcaggagctgttgtagaggtcgggccatggaggggtgctgcttactggcttgttctttatggcctgctcagcctgctttctaatagaacccaggaccaccagcccagggatgcacaacccacaatagtcctaccctgttgtggatttggtttattgcttatattatgttaattgggtccccaaattatacggaaatttgccatctgcatgtaagacacccagggtccctgcccccagttggttctaatagttaaataaagttgccagtggtcaatggttgggcagggagacagaggcgggactttacatttcctgggcaagggaacccagggaagaaaaaggatttagaatcgccatgctgatcaagcttgagagctgcgggagaggaagcatacagccatggaagagtgagagctgtgggacaggaagcatacagccatggaagagttggggaagagcagccccagcggtgcctcccccactgggtctggggtaacaaagatggagtatagattttagtaagtaatcattcatgagtatcagagggtaggagttagtaacatgaaaattagggagtggcccaaccactgatttacgtagagcatattaaaaataaggctgtgtgtgtttgtctttcattaaaaaatccagagcatcttgtcaggtggcaagcattgagcaccaatttgagtagtgttcacaattaatacagcagatggtgtccaacctgtaggctcgcactcactaaaaaaactaattggaaatgctcaaagggagaacacacaccatggcatgagattaggaggtggaagaattggcttcttagcacagctgctggttcttccccaagcccaaaattgggtttggaactagaacaaagggaatgctaattggagcgcataattttgggttttgtagtttaaggatgagacacacccaggctgacccagacaaagctgggtggcagggatttaccagattaacacaatacgcccccatcaatctctggtgagaaaacgccttacaggctggcctaaaaccctattttttttttaactgaggttcctttctctcagatgacttcagcttgtgtcaggtcgacatacaactgtccagaacaaaggacagctctaggagttgcttctctcttccttctgccatgtggatcctagggattgaactcacgttgccaggattggctgcaagtgctttaacctgctagccttcccacccagcccctgaactggcttcatttatcaagattaataataataataataataataataataataataataataataataaagacatcccagatagaaaaaaatctataaagtcagggaagatagagaaatattttccactgttagaatgttcaagtcagcaatagacatagccctgtgtcttggaaaggacattctatccatttagaacaggaaattaaccaaacgctaccccaagcctagactgcaccgatgtctagactgtactctggcaaggatcacacctgaaacaaaaattagttacaaaaaaaaaaaaaaaactgtgagaaaaaccaagttttatgttttccagtggaccacgtaataaaacgagacttcctgattccagcatttcctcccttcttacaagcctctgcccacttatcgatgccacagtctagactccacaatgctgcacttccccggcgttcctccttcctttccagctctttctcagcctcctcactgagatgcctcttctgcctcttcagttgcaggactcacaaagacaatttggactgggtctcagactcagaggttcccttcatctccatcttcctgtccttttctaatgtgacctttcccaacatcttagcaccaccttatatgctaatgggtcacaaactcatgtcttcgtccctggcctcccagcttagatcaactgtcttcttgacatctccacttacagatctagtaataggcatcaaagtatttcttaatcaaaactcttgatttttgtgtctccaactcttttcttctgttcatcttcagatcagtcaatgatacctgattaggtctcctttctaggcctgaagatcacacagaacttggaatataagtcatcattttcttttcttgtaggaaacagtggctttaaccggctataaccaacccattaccctgaaggttaacactttaatcaactataactcctgaaggtaaatgttttaagacccaggtgccctactctcaaaacacaaagcatgcatattgcaaacagcaaagaaaatctcgttggtcacaaagagcctatgaaaaataatatttttagcccttcttgaacagctattggcagttaaggtcacatggggggaagggaagtcctactccttagaaattctcaacctctgctcatgcggataaccttaattaaatatagtgaattgcacacgaatacacacataggcatgtgcacacacacacacacacacacacacacacacacacactggctatgcccccagtatacaggacgtgccagctcctgtccccacaatactcacatcccgcaccctctcctttcctccttattcctcattgctttctcttccctccttgttccctggctcctagagaagtaggcagatgctatgcaattgttagtgagcaaaaggatgactgtgcacactgtacttcgggttcccaaacccacaaatacaccatccatcttcttttaaggcagtgaaggacaaacgccacctcagtgagaagattaatttactcttaaattaccctcgtctactcggtatgcaaaagtgaatgctctttttcttttccccctaggaagagcactgcagtgacttgaggaaattaaacaatgctgtcaccacagctctggcttagattaatgaagtcagcatctctggagattgagcgctgccatttgcattgttcaaacgctttctaggtggtatggtgagatgccagagggctaagggccattatagcagggtagtttgactaggaatacataagatagaaagcctagaatcgtatcattgaaagggacaatggacctaagagaagtggaataaaattgtgtcacgctgtgtggttctgtgatttctttagattgagggttgaaggggcctccaagttggcacggacacacccagacaccaaattctcagcacaaaagagatatattacccttaaggaacaagcagattggctgggggttgggggaaatgcctctgaacgggacaaagacagcagcaggtgtttttgcagaagtggtgggttttttttttttttttggtttggttttggttttttggtttgtttttaggagaaagggtgtagggaattctatgctagagtaagttgctaagtccttacagatgaatgcaggacagagcacaggaagccccaccccagggtcacaggataggcctttcatcttgggtttcaaggtaaaaagtggaatgggctgaaaggagctttctctaatatgaataaagtaaatgtgacctctgcccttcctcttccctgaggctagctgaagatgctctctctggaaagggaggagagcgcgccattgtcatgttctaactaacacgccattgacatgttctaactaacagatcactggaatgagtgacaacggccaatgctttcttgtcccttactcctagcctgcagacccctctgaagttgaactcttcagatatctctgcagctcttaaatgacaaaaccccacagtattagctttttctcctaggtttcatttaatcacatctatttttttatggccttctgccttctccttacctttccccagctagtcttcctttacaattccagacttgtttccctaggttcagctgacaagctccttcctgcttagttcattatcaccctaaattctgtttttctctctcctctgttcatttctatgtacaaatatgaaggactctctcttggtttttgagacggggtctcactacgtagctctggatttttagaactcacaatgtgaccaggttagtctcaaactcacagagtatgcctgtctctgcctcctgtgtgctgagactaaaggcatgagctgccacacctggccaatgattaagagtcttgataaaatagtcaaagacaaatgcctgtgtcaaaacccattccgggatcctacaacaatccaaaccacaaggtgaattcaaagaaaataattggaacacgtgatttcttgaggtagagattttcaggaaagaaaggatacaaaaaagaattctgcctatattataaagcaaaatgtgcaatttgataggacatagacaaaaggatttgtgcatatcagtggatttcactgtgacagttccatgaatgtgttagcgatcaggcatttccaccagcctgcccttgggaacatcgtagcgcagcgtacatcattacccacagccaagtttgacaagtgcaacagatatggtgtgtgaaagcaccctcccctccagatctctctctgggtccttatctgtatttttctcttcctcccattccctcattgtctcattcattctatctaattccctgtcttgttctttctctctctctgcccgtttgtctccataaacctcttacactacatatgttgcatggcatactttcttagcagctcaccttgacatggccatcaaaggtaccctcacactcaccacactatcctaacagtataaatatatcaggttttggtcatattcaagtattccctttccctggtcttttccttaccctccctaaattgtccctctactactacgtttaagagtattatctttttatcttttttttatctttataaaacataaatgacctaggtataataatatatacctgtaatctcaacacttgggaaacaaagtcaagaagatcagaaactcaaggccaaccttggttatgtaataagtccaaaccttgcctagattacaggactggtgatgtgtaagactcacccaggtggtactggctttgaaggcatgaaggggtcatgaagagtagctgaagcttggcactgtgagaggccagggaaggccattgatgaaagtatagcctcagttgcagttgatggcccagtactgaaggggtaatgcaaaaaagctgagccttggcaccataaagagaacctatgagaaactatttgtgaaacctagttgcagtagaagactccagagaattggagatgccagaaccgtggaatgatcagcagcagtggagtggagtcaaccagaacctagagtgctacagagggcagagctggagaagtggcacacgtcctttggaggagcccagaaaatcatgtgtagatctcagacactggaacaagaagctgtaacacagaagatgccttggataccacaatgttagagatatcagagccatgggatatctgccaaggaaagttgctaacagggagtggaaccagctcaagagaatgaagtttgttactgctgaatgccagatctgccaacagcaatcaacaaggatgaaaggagctagagttctgaagaccaccttggcattaaacatggaaacatagagtttggagtttgaccagctggtttttggtctggctttggtccagtaattcctctctgagatgttttggaattgggaatgtatatcctgtgccatgatgtgttggaagtatgggatctgcttttttattttgattttataagggattacagttaagagattgcatgaattccaggagagactttgaactttgggcttttaaacattgatgagactattattatagactatggactaaatgaagttggactaaatgtattatacattgtgctatggctaggtatgactcccttagactcgtgtgtttaaacaagcctatggggaccagggaatagaatgtggtgatttgaatatgcttggcccatagggagtgagactattaggtgtggactttttggaggaaatgcgtcactgtgtgactcctatgctcaggctctaccccttgtggaaaagagcttcctcctagatgcctgagaacaccagcctcttctggctggttgcctttgaatcaagatgtagaactctcagctccttctctagcaccatgtctgcctgcatgctgctatgcttcctgctatgataataatggactaaacctctgaaaattgtaagccagccccaattaaatgtttgtctttgtaagagttgccttagtcatagtgtctcttcatagcaatagaaacactaagacaactagtacacaatacctctaaataggtaaacaaaaataaacagataatcgcccctatgataagtcctttgaatacttcagtgatgctaataacatctttgtaggttatattacttcaaggcattcatgcttgctgctcttgttttatggctagctttctttcactgttttcacaatgaaaaaaattcatcctcataaaaaggccatggtatatcaacttaaaagattccttacctcccccacctcattcattcatggggttctttcacagcactgacttgtactggaaaagacattttgtttcttttcccctcttaggatgtgagttgtatttatgcagttgacacagtttagaggatgcagatcagacttctgtcttgctgggcaagtgtcctaccactgagccacagccccagttgcactgttcattctacacagtgtcttacctgtttctcccactgagatggttaatcttgattgtcaacttaatgaaatctaaaatcaccatggaaacaagtctctgggcatgactgtgagttcatctagatgggggtcattgaagtgtggagacaacctcaaaatttgtgtggtattactccaaggactgcggttcctgactgatgaagaggagaaggcaaaccaagcacaagcatttgtggcccgtttcctgactgcagtgagaagcaagcctcctattcctgctatcacgccctcccaccaggatggaaggacctccctcaaattgtaaactaggataaactgttctttctttaaatcccttcttatcaaattttgtttcagtaataagataagcaactgacgcacccattttcctctaagttcaaggaaaacatgcctttgtcactgctgcagtctgagaacatagaccatatgatttaacacagatatctcaatatctataaactaataaaggcatgattaacactatggaggtggctatggggatggagttactcttctgaggtggtgacttcttgtttccattcttttttttttttttttttttttttatatttatttattcattatatgtaagtacactgtagctgtctttagacaccccagaagagggcatcagatctcattacggatggttgtgagccatcatgtggttgctgggatttgaactcacgaccttcagaagagcagtcagcgctcttaaccgctgagccatctctccagcccccgtttccattctttatttacaatgataaactataagtaaaaccttttatctcatttggattcatagagtgatttttaaactgtaacatgcccttttttagggagccacatatctgaatcataaattatagtgggttgatgttcaaggtctatttaatattctatgtacctatctttatcttttcttacatcttaagagacagggtcatattagaaagttcaagctagtctcaactcagcatcttcctgtctcagcctcccaagtgtgccacgatgcccaatttcattgtgctgctggattaaggtaggataaactatatctcctagctttcagtgaagctagataaagacctccctgccttttttgacttaacaggggaaagggttagatttgatgagtgttggcatttcagaaatagacttcatatttctcaagtggaatccaccaggctagggaaattgtttaattggtaaagcatttactgcataagcataaagacctgactttaaatccccagaac

SEQ ID NO: 747 - DNA, 2443 bp, Mus musculus
agatggcccgttcaagttccacgttccctactgctaagagtcttagcttacaaaagatattcttgtaagccaagtgtgaagttaatcacgacaaccaaaggtttgctaacatagaggaagagctctcatcaataggggaacagaaagtctcagcgacaagcttatgaaagaatggctgtctcaagggctccagcacccgactccgcctgtcagaggatggtctggctctttccacttgtcttctgcctcggctcagggagtgaagtttcacagagcagctcagacccccagctaatgaatggcgttctaggagagtctgcagttcttcctctaaagcttcctgcagggaagatagccaatatcatcatctggaattatgaatgggaagcgtcacaagtcactgccctcgttatcaacctaagtaatcctgaaagtccacaaatcatgaacactgatgtaaagaagagactgaacatcacccagtcctactccctgcaaatcagcaaccttaccatggcagacacaggatcatacactgcgcagataaccacaaaggactctgaagtgatcaccttcaaatatattctgagggtctttgaacgattgggtaacttagaaactaccaactatactctcctgctagagaatgggacctgccagatacacctggcctgtgttttgaagaatcaaagtcaaactgtctcagttgagtggcaagccacaggaaacatctctttaggaggaccaaatgtcactatcttttgggacccgaggaattctggtgaccagacttacgtctgcagagccaagaatgctgtcagcaatttgtcagtctctgtttcgacccagagtctctgcaaaggggttctaactaatccaccctggaatgcagtatggtttatgactacaatttcaataatcagtgcagtcatactcatctttgtgtgctggagcatacatgtttggaagagaagaggttctcttcctttgactagccaacatccagagtcctcccagagcacagatggcccaggctctccagggaacactgtgtatgcacaagtcactcgtccaatgcaggaaatgaaaatcccaaaacctatcaaaaatgactccatgacaatttactccatagttaatcattccagagaggccgaatactcttaaagacatcaaattggcgaaagactttaaagaaatccagggagaacacatctactgatcccttggaagagaacagaaaagaagcgtgctttccaactggcaatgggatccggatgcccagggttatcacttcagcctggatccttcctacaagtgtcagactcttcaggggtagcaagatctgtagtacataaccccaaaactacattccagtcagatccaggacaaatcctgctttgggtaactcatccacatgctgctttctctctgacaactaaacagtcagagttctgatggacagattgattccgcaagtaatcacttctccttctagaaggcagcaggatgtgattggctgtagagagagcacggtgttttggttaaatgtgtagtatctggcattggatggaccacactcatgccctgacaaatcatttacttagacaggccctctgggatattttctatgttcttggacctttaatctcacagccaataagaggaggatagcgatgcattgcttccattgctcacaccaggaatctaagccatccatgactacagtttatccccaaacacttcagactctacctccaatatatattaaacagatctctctcttttcaacttgtagaccatcatcctatctccatttctcccatctggaacctgaggtactccaattatctctaaacatctcttctaattttgctcttgtctctgcattacccatggtctaaaagacaaccagcacaatgtccttagtatagtcccactcttcctattgtctgcctgtacccttgcagactcctcatcacagccagtgtgaaagccagagttcctggctcaggatggtctgccacatccccagactctgctagtttcactctccccattctctgtttgatctctgtgaccttttagctcctctatcagagaagaaatttctccatagtatagtcacttacatctgccccaaagctcttcttctgcctgttgggttcctcctgtactttagacctcaacttaaatacatcatcttctataaaagaccttcccagtgcagtctacctaaagagggattccttattagtctctttaacttccatgttgtttatcacatgatattgaatatttatttttaatatctgtttcccttattagaggataaatctgtgggatcagagacaataactattttattgctgtaatcattaatatgtagaacattgtaagtgttcaaacaatacctttagtaaataaatgtatacatgatgga

SEQ ID NO: 748 - protein, 329 aa, Mus musculus
MAVSRAPAPDSACQRMVWLFPLVFCLGSGSEVSQSSSDPQLMNGVLGESAVLPLKLPAGKIANIIIWNYEWEASQVTALVINLSNPESPQIMNTDVKKRLNITQSYSLQISNLTMADTGSYTAQITTKDSEVITFKYILRVFERLGNLETTNYTLLLENGTCQIHLACVLKNQSQTVSVEWQATGNISLGGPNVTIFWDPRNSGDQTYVCRAKNAVSNLSVSVSTQSLCKGVLTNPPWNAVWFMTTISIISAVILIFVCWSIHVWKRRGSLPLTSQHPESSQSTDGPGSPGNTVYAQVWMQEMKIPKPIKNDSMTIYSIVNHSREAEYS

SEQ ID NO: 749 - DNA, 58226 bp, Homo sapiens
cagggtcatagcataatagtggagagaaggtcagcagataaacacgtgaacaaaggtctctggttttcctaggcagaggtccctgcagccttccacagtgtttgtgtccctgggtacctgagattagggagtggtgatgactcttaacgagcatgctgccttcaagcatctgtttaacaaagcacatcttgcaccgcccttaatccatttaaccctgagttgacacagcacatgtttcagagagcacggggttgtgggtaaggttatagattaacagcatcccaaggcagacgaatttttcttagtacagaacaaaatggagtctcctatgtctacttctttctacacagacacagtaacaacctgatctctctttcttttacccacatttcccccttttcttttcgacaaaaccgccattgtcatcatggcccgatctcaatggttgctgtctcttcagagctgttgggtacacctgcagaaaggctgtcacttcacacttggaagattgcacagcggccaggcagaggtgctcctcacttcccagacggggtggcggccgggcagaggcactcctcatatcccagatggggcggccgggcagaggtgctcctcacatcccagacggggtggccaggcagaggtgctcctcacttcccagacaataggcagctgggcagaggttctcctcacttcccagacaggtcggccgggcagagacactcctcacctcccagaaggggtggctgggcagagacgctcctcacctcgcagacggggtggctgggcagaggcgctcacttcctaggtggggcggctgggcagaggcgcacctcacctcccagatgaagggcggccgggcagaggaactcctcacctcccagatgatgggtggccaggcagaggggctcctcacttcccagacagggcagccgggcagaggtgctcctcacctcccagacagggtggctggacagaggcactcctcccctccccgatggggtggctgggcagaggcgctcctcacctcccagacagggcggccgggcagaggcgctcctcacttcccagatggggtggcagccgggcagaggcgcccctcacatcccagatggggtggtggctgggcagaggcactcctcacttcccagacggggtggcagctgggcagagatgctcctcacctcccagatggggtggcggctgggcagaggcactcctcacttcccagacggggcggccgggcataggtgctcctcacatcccagatgatgggcggccaggcagagacgctcatcacttcctagacggggtggtggctgggcagaggcgatcctcacttcccagatggggtggccaggcagagggtctcctgacatcccagacaatgggcggccaggcagagacgctcctcacttcctagacggggtggcggctaggcagaggctgtgatcttagcactttgggaggccaaggcaggcagctgggaggtggaggttgtagcgagctgagatcatgccactgcactccagcctgggcaacattgagcattgaatgagcgcgactccgtctgcaatcccagcacctcgggaggccgaggcgggcagatcactcgaggtcaggagctggagaccagcccagtcaacacggcaaaaccccgtctccaccaaaaatacaaaaaccagtcaggtgtggcagcacatgcctggaatcccaggcattcggcaggctgaggccggagaatcaagggagcccgaggtagggaggttgcagtgaggtgagatcacggcagtacagtccagcctcggtaaggtggggggtggggcagagagagagagaaagagagagagagagagagagagagagagagaatcaaatatctgatgaggaattaatatctagaatacataaagaactctacaaccccccccccaaaaaaaaatccaagttaaatttgggcaaaggacttaaatagatattattccaaagaagatatacaaattgccaataaggccaataagcacatgaaaagatactcaacattattagtaattaaggaaatataagtcaaaaccataatgagataccacttcacattcattaggataatcattatcaaaaaatgaaaaataaaaaatattggcaaagatatggaaaaattagaaccctttttccaattgcaggtgagaatgtaaaatgatgaagccatcatgaaaaacagtttggcagttcctcaacaggtaaacatagaattaccatatgatccaacaatttcactcctaggtgaatccaaagaaatggagagcaggaattcaaacagatacctgtacaccaatgttcatagcagcattattcacaatagagaaaagatagaaacaacccaagtatccaccaatagatgaatagataagcaaatgtggtacatacatataatggaatattatttagttgtaaaaaaggatacaattctgatacatgctacaacatggataaaccttgaatacattatgctaagtgaaataagccagacacaaaaagacaaatgttgtatgattccacttatataaggtacctgcaaattaatagaaacaataagtagattataggttactagggactgaaggaaaagggaacggggagccattgcttaatggtcactgtttccgtttggggtaatgaaaaggctttggaaatagtgttgatgactgcacaacattgtgcattaatgccactaaattgtacacttaaaatggttaaaatgataaattttagattacatagccacgatatataatttaggttattttaccacaataaaataatcacctccaaatggaaaaagtatatagatggaaagtgaaatttccaattcacattgcacaattaagatttgtgcacttgactactgggcaagatgacaagataggaacagctacagtctgcagcaaccagtgagatcaactcagaagtggggtgatttctgcatttccagttgaggtacccagctcaccttggaagcgcaaggggttgaggatctctcccctagccaagggaagctgggagggactgtcccatgaagaatattgcacttcagcccagatactacgcttttcccatggtcttcacaatctgcagaccaggagattccctcaggtgcctacaccaccagggccctgggttccaagcacaaaactgggtggccatttgggtagacaccaagctagctgcaggaggttttgttttgttttgtttcccataccccagtggcacctggaacaccagtgagacagaaccatttattcccctgaaaaggggggctgaagccagaaagccaaatggtgtagctcagcggatcttacccccatggagcccagcaagctaagatccactgccttgaaattcttgctgccagcacagcagtctgaagccgacctggaaagctcgagcttggtggggacaggggcatccaccactactgaggtttgagtaggcggttttcccctcacagtgtaaacaaagctgccaggaagtttgaactgggcagaccccagggcagttcagcaaagctgctgtagccagactgcctctctagattcctcctctttgggcagggcatctctaaaggaaaggcagcaacctcagtcagaggtttagagatcaaactcccatctctctgggacagagcacctgggggaaggggcggatgtgggcttagcttcatcagacttaagcattcctgcctgctggctctgaagggagcagcggttctcccagcacagcgctctagcactgctaagggacagactgcctcctcaagtgggttcctgacccccatgcctcctgactgggagacacctcccagcaggggtcgacagacaccttatacaggagagctcgagctggcatttggcaggtgcccttctgggatgaagcttccagaggaaggaacaggtagcaatctttgctgttctgcagcctccgtaatgatacaggcaaacagggtctggaatggacctccagcaaactccagcaggcctgcagcagaggggcctgactgttcgaaggaaaactaacaaacagaaaggaatagcatcaacattaaccaaaaggatgtcaacacagaaactccatctgaagctcaccaacatcaaagaccaagggagataaatccatgaaggtggggaaaaaacagtgcaaaaaggctaaaaattccaaaaaccagaatgcctcttcacctccaaaggaacacagctcctcatcagcaagggcacaaaactggaaggagaatgagtgtgatgaattgacagaaataggcttcagcaggtgggtaataacaaactcctccaagctaaaggagtatattctaacccaatgcaaggaagctaagaagcttgaaaaaagattaaaggaattgctaactagaataaccagtttagagaagagcaaaaatgacctaatggagctgaaaaacacagcacaagaacttcgtgaagcatacacaagtatcaatagctgaatccatcaagcagaagaaaggatatcagtgactgaagatcagcttaatgaaataaagcatgaagacaagattagagaagaaagaatgaaaagaaatgaacagagcctccaagaaatatgggactatctgaaaagaccaaaccttcatttattggtgtacctgaaagtgatggggagaatgaaaccaagctggaaaacacactttaggatattatccaagagaacttccccaacctagcaatataggccaacattcacattcaggaaatacagagaactccacaaagatattcttcgagaagagcaaccccaagatacataatcttcagattcaccatggttgaaatgaaggaaaaaatgttaagagtagccagagaaaaaggtcgggttacccacaaagggaagcccatcagactaacagcagatctcttggcagaaaccctacaaggcagaagagagtggaggacaatattcaacattcttaaagaaaagaatttacaacccagaatttcatatccagccaaactaagcttcataagtgaagaagaaataaaattctttacagataagcaaatgctgagagattttgtcaccaccaggcctgtcttacaagagttcctgtaggaaccactaaacatggaaaagaacaaccggtaccacccactgcaaaaacataccaaattgtaaagaccatcgacactatgaagaaactgcatcaactaacgggcaaaataaccagctagcatcataatgacaggatcaaattcacacataacaatattaaccttaaatgtaaatgagctaaatgccccaatcagaagacacaggctagcaaattggataaagagtcaagacccatcagtgtgctgtatccaggagacccatctcatgggcaaagacacacataggctcagaataaagggctggagcaatatttaccaagcaaatgaaaagaaaaaaaaagcagggattgcaatcctagtctctgataaaacagactttaaaacaacaaagataaaaaaggacaaagaaaagcatcacataatggtaaagggatcaatgcaacaaaaagagctaactatcctaaatagatatgtgcccaatacagaaggacccagatttataaagcaagttcttagagacctacaaagagacttagactcccacacaataataatgggagactttaacaccccactgtcaatattagacagatcaatgagacagaaaattaacaaggatatccaggacttgaactcagctctggaacaagaggacctaatagacatctacagaactctccaccccaaattgacagaagacacattcttctcagcaccacatcacatttattctaaaactgaccacataattagaagtaaaacactcctcagcaaatgcaaaagaatggaaatcataacaaactgtctctcagaccgcagtacaatcaaattagaactcaggattaagaaactcactcaaaaccacacaactacatggaaactgaacaatctgccctgaatgactactgggtaaataaaaaaattaaggcagatataaataagttctttaaggccaatgagaacaaagacacaatgtaccagaatctctgggacacagccaaagcagtatgtagtgggaaacatagcactaaatgctcacaagggaaagcaagagaaatctaaaattcacatctgacatcacacttaaaagaactagagaagcaagagcaaacaaattcaaaagctaacagaagacaagaaataattaaaatcagagcagaactgaaggagatagagacactaaatacccttcaaaaatcaatgaatccaagagctgttttttgcaaagatcaacaaaatagatagctagtcagactaatgaagaaaagagaagaatcaaatagacacaataaaaaatgataaaggggacattgccactgatcccacagaaatacaatctaccgtcagagaatactacaaacacctctacacaaatactagaaaatctagaagaaatggataaattcctggacacatacaccctcccaagattaaaccagaaggaaatcaaatccctaaatagaccaataaaaagttctgaatttgaggcagtaattaataacctaccaaccaaaaaaagcccaggactagatggattcacagccgaattctaccagagatacaaagaggagctggtgccattccttctgaaactattccaaacaataaaaaaagagggactcctccctaactcattttatgaggccagcatcatcctgataccaaaacctggcagagacacaacaaaaaaagaaaattttaggccaatatccctgatgaacattgatgtgaaaatcctcaataaaatacaggcaaactgaatccagcagcatatcaaaaagcttatccaccagccgggcatggtggctcgtgcctgtaatcccagcactttgggaggctgaggtgggtggatcatgaggtcaggagatcgagaccatcctggctaacacagtgaaactctgtctgtactaaaaatacagaaaaattagctgggcgtggtagtgggcacctgcagtcccagctactcaggaggctgaggcaggagaatggcatgaacccaggaggcggaacttgcagtgagccaagattgttccactgcactctggcctgggcgacagagcaagactccacctcaaaaaaaaaaaaaaaaaaagcttatccaccacaatcaagttggcttcatccctggtatgcaaggttggttcaacatatgcaaatcaataaatgtaattcatcacataaacagaaccaatgacaaaaaccacatgattatctcaatagatgtagaaaaggcctttgataaaattcaacatcccttcatgttaaaaactcttaataaactaggtactgatggaacatatctcaaaataatgagagctatttatgacaaacccacagccattatcatactgaatgggcaaaagctggaagcattccctttgaaaactagcacaaggatgccctctctcaccactcctattcaacataatattgaaagttctgaccagggcaatcaggcaagagaaagaagtaaagggtattcagataagaagagaggaaatcaaatagtctctgtttgcagatgacatgattgtatatttagaaaactccattgtcttagcccaaaatctccttaagctgataagcagcttcagcagtctcaggatacaaaatcaatgtgcaaaaatcacaagcattcctatacaccaaaaatagacaaacagagagccaagtcgtgagtgaactgccattcacaattgctacaaagagaatataatacctaggaatacaacttacaagggatgtgaaggacctcttcaaggagaactacaaaccactgctcaaggaaataagaaagtacacaaacaaatggaaaaccattccatgctcatagataggaagaatcaatatcatgaaaatggccatattgcccaaagtaatttataggttcaatgctatttccatcaaactactattgactttcttcacagaattagaaaaaactactttaaatttcatacagaaccaaaaacgagcccatatagccaagacaattgtaagccaaaagaacaaagctggaggcagcacgctaactgacttcaaactatactacaaggctgcagtaaccaaaacagcatggtactggtaccaaaacagatatatagaccaatggagcagaacagaggcctcagaaataacatcacacatctacaaccatctgatctttgacaaacctaacaaaaacaagcaatggggaaaggattccctatttaataaatggtgttgggaaaactggctagcaattatgcagaaaactgaaactggttcccttccttataccttacacaaaaattaactcaagatggattaaagacttaaatgttagacctaaaaccacaaaaaccccagaagaaaacctaggcaataccattcaggacaaaggcatgggcaaagacttcaatactaaaacatcaaaatcaatggcaacaaaagccaaaattgacaaatgggacctaattaaactaaagagcttctgcacagcaaaagaaactatcatcagagtgaacagggaacctacagaatgggagaaaatttttgcagtctatccatttgacaaaaggctaatatccagaatctacaaagaactcaaacaaatttacaagaaaaaaaaaaaaaccccaacaaaaagtgggcaaaggatatgaagacacttctcaaaagaagacatttatgcggccaagaaacatatgaaaaaagctcatcatcactggtcattagagaaatgcaaatcaaaactacaatgagataccatctcatgccagttagaatggcaatcattaaaaaatcaggaaacaacagatgctggagaggatgtagagaaatgggaatgttttcacactgttggtgggagtgtaaactagttcaaccattgtggaatacagtgtggcgattcctcaaggatctagaactagaaataccatttgacccagcaatcccattactggttatatacccaaaggattataaatcatgctgctataaagacacatgcacacttatgtttattgcagcactgttcacaatagcaaagacttggaaccaacccaaatgcccatcaatgatacactggataaagaaaatgtggcatatatataccatggaataccatgcagccataaaaaaggatgagttcatgtcctttgcagggacatggatgaagctggaaaccatcattctcagcaaactaacacaagaacagaaagccaaacaacgcatgttctcactcataggtgggaactgaacaatgagaacacatggacacaggtaggggaacatcatacactggggtatgtcacggggtggggggcaaggggagggatagcattaggagaaatatctaatgtagatgacaagttaataggtgcagcacaccaacatggcatatgtatacatatgtaacaaacctgcacattgtgcacatgtaccctagaacttaaagtataattttaaaaaatcagttttcttttggctttttcttagctttatacttaaatatttttttctaatgtaattagagtggaattgttttttgaattttatttttggattactcatagctagtatatacaattgcaattgaattttatattttgattttgtatcttttcaccttgctgaactcatttatttgttctagtagattttaggaaattccttacagacttttacatataagtttatgaaagatgcaataaaggactttatcttcttttccaaaaaaaaaaaaaatttgtgcacttagctcagaaaaaagtaaacaaaaaattaacacagttacaaattaggatttttagtgcaggggaagaagttgtcaccacgcctctaagaggaaggggaagtctcagaagtattttcagtttatgacagaagggcaaaaacattgactgcctcaaggtctcaagcaccagtcttcaccgcggaaagcatgttgtggctgttccaatcgctcctgtttgtcttctgctttggcccaggtaaatgtcaatccagatcggtgtagtcactgagtgactccctggttttgtgcagcttgctcaacctaaatcgtctgtatacagttgtctggctctctgccaagggattggggcgggaaaggggacgctggcagtgttacctgatatactactacctcctctcaactttggatgcgataagcctgagatggttgtcggtgaacaatttcaattgtgtctgcatgtaagaaagttatttgctggggcagaggaaataagcttttgaagacaagactgtttgtggtttatgaccagcatcttgtgttataaagagtaccaagaccaagaaaatgggccctcataccaatgtatctactatcgtactgtgaacctcagggaggttacttatccttcctgaacctcactatcctcatctaaaatattaaaaacctattattcagttgagccaaattttctgggcccaaccaaacacaccaaaaataaccctctcaccttttgctcattgcaaaaaaaaaaggtttccatctctcccctcctttagtgcaaattagggctagctagtccagcaatgcattatatatggcagtgagaaaagaatgaactgatccagctggcttcttgtttcctgctgtccattatatggagaagatgaagattcatatcacatttggggaactacaagtggtccacgggagacaaagtgtagcattcaggcagagatagtccaggagaccaatggaaatctagtccagagctagcccagggtagcagataaaagtaggaagcattcactgagcacttattgtatttcaagtattgtgccaggtgctgtacacacgttatgagtctcatgagaattctatgaatttatactattaatatctccattttaaaatgaagaactgaggtgaacttaatttaaataatttgcccaaatttcattagccagcatgcgacaagctcttgtaatagttatgagaaaaaataacagttcaacaagtgtggcagcagcataagagaaagaagagactgaagcaagagatcccatcaatatggagttaagtagagtaattggtaattggaatgagaaaggaataaatattcattgagcacctactgaatgcttggcactcttctagtttgcatgaatacatcatgaacaaagcaagcaaaaattcctgccctcatggagttaacattttagcaggagacaaactgtaaaaaaagataaacaagtaaaatagtgtattgggtaggaagaaataaatcaagaaggaaagggagagatgaaatatggtaaagacggcagtgaaatttcagacaggatagccaaagaaagtgacaaaattggaaggtggagagcagccacaggaggaaggtgagttcaattttggacctactgattttaggatgtcagtgtgctatacatgaggaagttacgtggaggatcctgggaacttaggactaggggtagagctgaggctagagacttaaaaatcaatggcatagagatatgttaagctgaggagaaaactggaatgagaacagaactttgggaaatatatataaaatgcagaaagagagagaattctttccttcattcaagagccacttcctgatctaggagcagaatcttgagtttttgcttcatttttaccaccctgcaaaattatttccacctctagaataaaatattctgaatgtccttgtgttaaaactcctcttcttctccctatttccatgaatacttcttataatgaccctatgaaatatacagtgctccaatctccacttcacagatggggaaagaaggcacagaacactaaagtaacttgctcactgccccacatttatgggggaaatgggtatagaaagagaaacacatttgaatgagtttacaggaggcagatgcaggtgttctgagacccaggaggagagaagtggctgctagaattggaaatcaggaagcttggctccggagtctgtgctcatagccacttcactatgctacttagcttacacacagtcatacattcacacaaatgtgtacataattagaaaatgtgaggccagcaaaaaaaataagcagggcaccttcatagagaaaaacacggggacctgctttggacggagtgatgaagaaaggacttcctggaaaagtaacatctcatctgatatttaaagggtgtgaaaagttaaacaggaaaagtcaaatgaagaagattttagggcagagggaatcatgtgtgaaaagccgtgatgcaggaaagagcctggagtgatttaggaagggaaagaagaccactgttgcaaaaatgtggggcaaatgaaattaatctttgaaacaaccatgaaaaacaatgactcatgccagcctacattctttgaagtgggttgggcactatcctgactccttttagaaaatttagtggaaaagacaaaccatattgaaaaataatcccatttcctttaactcaagccctgggtggcaaaactaacagaacaaaacaataattgtaaataaaatcaagcatcatgacttcctagagaaaataaatctcgtttgtttcttcattttgatttttatagatggaaagttggaaatttgtcaaacttaaatgtgcatataaattacttgggggaatcttattaaaatgctgattggggaatagggactgagattctgcatttctaagaggctcccaggtgacaccaatgctgcctgtccatggaccacactaagcagcaaggttctaaattccaatggacttcagtcatactgggattgtagggaggaagaaatagaaactaactttgagtgtgtttgcaggaagcagatataggtattctgaggtccaggagagagcagtggttggaaatgtaagtaaagcaaacacatgagggctgattctgaggttgagtcaaaatgtgcaatgctcttctgtgaagagattgtgacccgatggcccccgagcagtgttatctactttttaccaaccgtccacatctttcaaatgtttattgtgctcaacaggcagagagctgttttatattttttcattatcctcagacacgtgtttttccacctctcagaatctgcaatctccaatgtgacctccaggtgttcatgcctctgtttttggtcccttaacccagattcagctttgattgtttctctgttcacactcagacattttttattaaggtgaaattcttgtaacaggatgtaataattttaaagtgacattttgtacattttgtgaaaccaccacttctattattctaaaacattttcatcaccccaaaaggaaaccctgtacccactaagcagtcatttcccattctcccctcccccccagcccctggcaaataccgatctgctttctgtctctgtgggtttacctattctggataatttcatataaatgaaatcacacaatatatgacctttcgtgtctgacttctttcacttagcatcatgttttccaggttcacctatgctgaaccatgtatcagtacttcattcctttttggctgaatagtattttgtattctgtatatactacattttatttatccatttatctatcagtggacacctgggttgtttttgccttttggctcttgcgaatagtgctgctatgtgtacaagtatttgactacctgtttttatctgggtatatacctaggaatggatttgtcagatcatataattctatgcttaactttttgggaaattgccaaactgttttccacaatggctgtaccattttacatttccactagctgtgtacaagagttataatttctccacatcctcatcaacacttgtttttttcctttttaaaaagattattatcaccatcctaataggtgtgaagtggtatattattgtggttttgatttacattttcccaatgacaaatgattttgagtatctttttaagtgtttattggccatttgtatatcctctttggagaaatgtctattcaagtcctttgcccattttagttgaattatttgtctttttgctattgagttataagagttgtttatacattcttggaaccagacctttaatacatgacctgaaaatattttctcccattctgtaggttgtcttttcactttcttaataatgttctttgatgcacaaaagtctttaattttgatgaagcacaatttacctatttttatcttttttcttttttatcattttattttaagttccaggatacacgtgcaggatatgcaagtttgttacataggtaaacatgtgccctggtggtttgctgcacctatcaacctcacctaagtattaagccctgcatacattagctatttttcctgatgctctctctcccccctgccccacccccgacaggccccagtgtgtgtcattccccttcttgtgtccatgtgttctcattgttcagctcccacttaaagaacatgcggtgtttggctttctgttcctgcattagtttgctgagaataatggcttctggcttcatccatgtccctgcaaaggacatgatttcattcctttttatggctgcatagtattccgtggtgtatacgtaccacattttctttatccggtctatcattgatgggcatttgggttgatttcatgtctttgctattatgaatagtgctgcaatgaagatacacgtgcaatgaacatgcacatacacatatctttataacaatgatttatattcttttgggtatatacccagtaatgggattgctgggtcaaattgtctttctgcctctaggtctttgaggagtccccgcattgtcttccagaatagttgaactaatttacattcccaccaacagtgtaaaagagtttctatttctccacagccttgccagcatctgttttttcttgacttctaaataattgccattctgacctgtgtgagatggtatcccattgtggttttgatgtgcatttctctaatgaccagtgatgttgagcttttttccatgtttcttggccacataaatgtcttctttttttttttaacacctgaagagtaagtttaatggaattcatagttacagatattcagaaaatatttgttgggggaactaattaatacatttctttcttttaatttttatttttagttctgggtacatgtgcagtatgtgcaggtttgttacataggtaaacctgtgccctggtggtttgctgcacctaccaacgcatcacctaggtattaagcccagcatgcattatctatttttcttaatgctctccctcccccaaccccactccccaagaggccccagtgcatgttgtttccctccctgtgtccatgtgttctcactgttcagctcccacttacaagtgagaacatgcagtgtttggttttctgttcttgtatgagtttgctgaggataatggcttccagcttcatccacattcctgcaaaggacatgatctcattccttttgatggctgcatagtattccatggtgtatatgttccacattttctttatctcgtctgtcattgatgggcattttggttgattccaggcctttgctattgtgaatagtgctgcaatgaacatatgcatgcatatatctttgtaacagagcgatttatattcctttgggtatatacccagaaatgggattgctgggtcaaatggtatttctggttctagatctttgaggatttgccacactgtcttccacaatggttgaactaatttacattcccaacagtgtaaaagtgttcctatttctccagaacctcacaagcatctgttgtttcttgactttttcataatcactattctgtcatgagatggtaatttattgtggttttcaattgtatttttctaatgatcagtgatgttgagctttttttcatgtttgttggctgcatgaatgtcttcttttgagaagtgtctgttaatgtcctttgctcgccttttaatggggttgtttgatttttttcttgtaaatttgtttgagttccttgtagaatctggatattagacctttaacagatgaatagattgcaaaaattttctcccactctgtaggttgcctcttggctctgataatagtttcttctgctatgcagaagctcttcagtttaactagatcccatttgtcaatttttgcttttgttgcaattgctttcagtgatttcataatgaaatctttgcccatgcctatgtcctgaatggcattgcctagattgtattctagggttttcatagttttgagttttacatttaagtctttaatctatcttgagttaatttttgtataaggtgtgagggaggggtccagtttcaattttctgcatatggatagccagttctcccagcaccagttattaaatagtgaatcctttccccattgcttgtttttgtcacgttttttgaagatcagatagtggtagatgtgcagtcttatttatgggttctctattctgttccattggtctatgtgtctgttttgtaccagtaccatgtaccgtgctgttttggttattgctgccttatagtattgtttgaagtccagtagcatgatgcctccagctttgttccttttgcttaggattgtcttggctatatgagcccttttttggttccatataaattttaaaatagttttttctaattttgtgaaaaatgtcaatgatagtttaatgggaatagtagtgaatctattaattacttcgggcagtatggtcattttcatgatgttgattcttcctatccatgagcacagaatatttttccatttgtttgtgtcctctctggtttccttgagcagtggtttgtagttctttttgaagaggttccttcacttcctttgttagctgtattcctaagtattttattctctttgtaacaattgtgaatgggagttcattcatgatttggttctctgcttgcctgtgtgtgttgtataagaatgcttgtaacttctgcattgattttgtttcctgagatcttgctgaagttgcatgtgagcttaagaagcttttgggctgagatgatggggttttctagatataggatcgtgtcatctgcaaacaaagataatttgacttcctctcttcctgtgtgaatatgctttatttctttctcttgcctgattgccctggtcagaacttctaatactatgctgaataggagtggtgagagagggcatccttgtcttatgctggttttcacaagaaatgcttccagttttgcccattcagtataatattggttgttggtttgtcataaatgtctcttattgttttaagatatgttccatcaatacctggtttattgagagtgtttaacatgaagggatgttgaattttatagaaggccttttctgtgtctattaagataatctgtggtttttgtctttagatctgtttatgagatgaattacatttattgatttgcatatgttgaaccagccttgcatcccaggaataaagccaactcgatcagggtggataagctttttgatgtgccgctatatttggtttgccagtattttattgagaatttttgcatcagtgttcatcaggatattggcctgaagctttcttttttgttgtatctctgccaggttttggtatcaggatgatactggcctcataaaatgaattagggaagggtccctccttttcaattgtttggaatagtttcagaagaaatggtgccaggtcctctttgtacctctagtagaattcagctgtaaatccttctggtcctgggctttttcttttagactatttattactgtctcaatttcagaatttgttattggtctattcagggattcagcttcctcctggttcagtcttgggagggtgtatgtgtccaggaatttatccatttcttctagattttctaggttatgtgcatagaggtgtttatagtattctctgatgattgtttttatttctgtggggtcagtagtgatatcctcttttaacattttttattgtgtccatttgattcttctctcttttcttctttgttagtctagctaactagcagtctatctatattattagtttttcaaaaaaccagattctggactccttgatttttttgaagcattcttcttttatctatctccttcagttctgctttgatcttggttatttcttgtcttctgccagctttggagtttgtttgctcttggttctccagttcttttagttttaatgttagcatttcaatttgagatctttctaggtttttgatgtgggcatttagtgctctaaatttccctcttaacagctgctttagctgcatccagagattctgatacattgtctctttgttctcattggtttcaaagaacttcttgctttctgccttaatttcattatttaaccaggagtcatgcaggagcaggttgttcaatttctatgtagctatgtgattttgagtgagtttctttgtcttgagttctaatttgattatgctgtggtctgagagactgtttgttgtgatttcagttcttttgtatttgatgaggagtgttttacttccaattatgtgatcaattttagagtaagttccatgtggcaatgcatagaatgaatattctgttgttgtaggatggagagttttgtagaggtctatcaggtccacttgatctagagctgagttcaagtcctgaatatctttgttaattttctgtctgaatgatctgcctaatattgacagtggatgttaaagtctcccgctattattgtgtgggagtctacatctccttgtacgtctctaagagcttattttaggaatctgcttttgtattgggtgcatacatatttaggatagttagttcttcttgttgaattgaaccctttaccatgcctttctttgtcttttttggtctttattgctttaaagtctattttgtcagaaactaggattgcaatccctgcttttttctggtttccatttgcctggtagattttcctctatccctttattttgaacctatgtgtgtgtttgcatgtgagatgagtctcttgaatacagcacaccaatgggtcttcacaatttacccagcttgccattctgtgtcttttaaatggggcacttagcacatttatatttaaagttagtattgttatgtgtgaatttgatcctgtcatcatgatactagctagttattttgcagacttattgatgtagttgcttcacagtttcattggtcttcattgtgtacttcagtatgttttgtagtggctgataatggcttttcctttccatatttagtgcttccttcaggagctcttgcaagtcaagcctggtggtggatgaattccctcagcatttgattgtctgaaaaatattttatttctcctttgcttatgaagcttcatttggccagatatgagattctgggttgaaaattcttttctttaagaatgttgaatattgacccccaatctcttctggcttgtaaagtttctgctgagaggcctgatgttattctgatgggcttccctttgtaggtgacttggcctttctctctggctgcccttaacattttttccttcattttgaccttgaagaatctaataattatgtgtcttgtggttgatcctctcatggagtatcttactgggttctttgtatttcttgagtttgaatgttggcctgtcttgctaggttggggaagtctcctggatgatatcgtgaagtatgttttccaactttgtttcattcacctgtctctttcaggtaccataatcagttgtaggttcggtctctttacataatcccataattctcagagattttgtttgttccttttcattcctttttctctaatcttgtctgcctattttatttcagcaagatagtcttcaatctcttaaattctttcctccacttggtctattcggctattgatacttatgattgcattgtgatgttttcatgttgtgtttttcagttccatcaagtcatttatgttcctctctaagctggttattctgatgaatagctcctgtaatgttttatcctgattcttaggttctttgcattgagttagaacatactcctttagctcggcaaagttcattattacccaccttctgaagcctacttctgtcagttcatccttctcagcctgagcccagttgtgtgccctgctggagaggtgttacaatcatttggaggagaagagacactctggctttttgagttttcagcattttttattgattctttctcatcttcctgagtttatctagctttgatctttgagtctgctgacctttggatgggctttttgtggggacttttttgttgatgctgttgttgttgctttctgtttgtttttcttttagcagacaggaccctcttttgcaagactgctgcagtttgctgggggcccactccagaccctattcacctgggtccctccccaccctggtggtgtcaccagtggaggctgcagaaccgcaaagatggctgcctgcttcttcctctgggagctccgtccaagaggggcaccaaactgatgacagtgggagtgctcctgtataaagtgtctggtaacccctgctggggagtctcacccagtcaggagtcacaagataagggacccacttaatgaagcattctgtctgtcccttggcagaaaggatgtgctgtggtgggggggatcctacttatccagactgcccagattcctcagagccagcaggggaaaagactaagtctgatgatccacagagtccgcagccccagtacccacagggactcaatcccagggagatcagggttctgtccataaacccttggctggagttgctgaaattcccacagggaggtcccattcagtgaggagggatgagtctgggtccagcctaaagatgcagtctggccacagtctgccacagctgctgtgctgcaccatggggaattcctcctggttccaaaccaccagtccctctggcactggcaggggaaagcagcagacagaagctgcagtgatggctgctgccccttcccccaagaactcagtagtcttagacggtctccagccaagtggcagctgagaatctgcacagctctgtgcttgggatccaaggcccttgtggtgttggctcacgaggggatctcctggtccatgggttgcacagatccatggaaaaagcatggtttcctgggtggggtagcacaatcactcaccacttcccttggctgggggtgggagcaccccttgccccatcagcttccaggtgggctgttgttccaccctgttttcctcactccctgtgggtcatgccaaccacctagtcagtcccaatgagtgagcctggataccttagttgctggtgcaggattcactcactgttttcgttcttctcagtgggatcctccaaccacagctgtttctagttagtcatcttggcccctccccacattttatcttttcttacttatgcttttggtgtcatatatcagaatccattcccaaatcaaaaatcatgaatatttatcattatgttttcttctaagagttttagctcttatatttaggtgatcgatacattttgagataatttttgcatataatgagaggaaggggcccaacttcattctgttgaatgtggatatccagttgtcccagcaccatttgttaaagagagcattctctccctattgaatgatcttagcactcttgtcaaaaatcacctggccataaatgtttgggtttatttatggactctcaatttaatttcatatagacatctataagtttatctttatgccagtaccacactgttttgattaccatatctgtatcagttttgaaattggaaagtgtgagtccaccaattttgcttttcttttacaatattgttttggctacttggggcatcttgaaatcacatataaatttgagaattagcttttccatttatgaaaaaaaatcaacattttgataaggattgcattgactctataaattgctttgggtggtatcggcatattaatattatcttccaattaatgaacataggatgtatttccatttatttagattttctttctttcagaaatgttatttagttttcagtgtattatcttgaacttctctggttaaattattgccaggtattttgttcttttgaatgctactgtacatggaactgcttttcttaacttctttttcagattgttcattgctagtgtgtaggaacagaactgatttttatacattgattttgtatcttgcaactttgctgaatttatttattagctctgatcatttttgtggattctttaggattttctattttcaacatcatgttatctgtgaataggaatagttttacacattctttttcaattgagatgcattttatttatttttcttgcctaattgctctggctagaacttccagttcaatattaaatagaagtggtgagactgggcactgttgccttttcatgctgttatttgaaaggcttttagtcttttatccttgagtaaaatgttagctgtgggttttcataaatgccttttatcagactgaggaagttcccttctatttctagattctaaagtgtttttatttaaaaggtgctggtttttttcaaatgttttttctgcatcaactaagatggccattagtctatttttcttcattctgttaatatcatatactgcattgattggttttcatgtattgaaccacttttgcattgctgagataaattctacttggtcatggtgtataatccctttaatatgagctggattcagtttgttagtattctgttgaaagtttttgcatcaatattcataagggatatcagtctgtagttttcttttttctgatatttttggctttggtatcagggtaatgctgacctagtaaaatgacttaggaagtgtttttctcctcttctatttttgggaagagcttgagaataattgaaactaattattctttgaataattagtagaatttaccagtgaagccatctggattttctttgtcaggaggtttttgagtactgattcaatctcttttcttgttataggtcctctttaattttttatttcttcttaagtcagtcttggtattttatgtgtttccagaaatctatttcatctaggttattcaatttgttggcatatagttatttatagtgttctcttaatccttttagttgttatttctataagatctgtagtaatgtctccacttctatgtctacttttagtaatttgaatcttttctattttattctttgtcaatctagctaaaggtttgtcaattttgtttatcttttcaaagaaccaacttttggtttcattgattatttctcttgtttttctattctctatgttatttatctctgctctaatttttatgatttgcttcattctaatagctttgggtttagtttgctcttctttgtctagttttttaaagtgtaaatttcctccttctttatttttttaatatactttaagttctagggtacatgtgcacatcgtgcaagtttgttacataggtatatatgtgccatgttggtttgctgcacccatcaactcgtcatttacattaggtatttctcttaatgctatccctcccccagctccccaccccctgacaggccccagtgtgtgatgttccccaccctgtgtccaagtgttctcattgttcaattcccacctatgaatgagaacatgtggtgtttggttttctgtccttgtgacagtttgctgagaatgatggtttccagcttcatccatgtccctacaaaggacaagagctcttccttttttatggctgcatagtattctatggtatatatgtgccacattttcttaatccagtctatcattgttggacatttgggttggttccaaatctttgctattgtgaatagtgccacaacaaacatacgtgtgcatgtgtctttacagtagcatgatttataatcctttgggtttatacccagtaatgggatggctgggtcaaatggtatttctagttctagatcctttaggaattgccacactgtcttccacaatggttgaactaatttacactcccaccaacattgtaaaagtgttcctgtttctccatatcctctccagcatctgttgtttcctgactttttaatgatagccattctaactggtgtgagatggtatctcattgtgattttggtttgcatttctctgatgaccagtgatgatgagcattttttcatatgtctgttggctgcataaatgtcttcttttgagaagtgtcttcatatcctttgcccactttttgatgggatttttttttcttgtaaatttgtttaaattctttgtagattctagatattagcgcttggtcagatgggtagattgcaaaaattttctcccattatgtaggttgtctgttcactctgatggtagtttcttttgctgtgcagaagctctttagtttaattagatcccatttgtctattttggcttttgttgccattgcttttggtgttttagtattgaagtcgttgcccatacctatatcctgaatggtattgcctaggttttcttctacagtttttatggttttaggtctaacatttaagtctttaatccatcttgaattaaattctgtataaggtgtaaggaagggatccagtttcagctttctacatatggctagccagttttcccagcaccatttattaaatagggagtcctttctccatttcttgtttttatcaggtttgtcaaagatcagatggttgtagatgtgtggtgctatttctgaggcctctgttctgtaccactgatctatatatatgttttggtaccagtaccatgctgttttggttactgtagccttgtagtatattttgaagtcaggtagtgagatgcctctagctttgttctttttgcttaggattgtcttggcaatgtgggctcttttttggttccatatgaactttaaagtagatttttccaattctatgaagaaagtcattggtagcttgatggggatggcattgaatctacaaattaccttgggcagtatggccattttcatgatattgattcttcctacccatgagcatggaatattcttccatttgtttgtgtcctattttattttgttgagcagtggtttgtagtcctccttgaagaggtccttcacatcccttttaagttggattcctagtcttccttctttctttcagagggataaaaatatccctctgagcactacttttgctccatcccatgttttggtaagctttgtttttgttttcacttggtgtcaagatatatcctaattcatcttgttatttcttctttgatccattgattattttacactatgttaattatgacatatttgtgaattttccaattctccttctgttcttgatttccagttttattccatttatggtcatagaagacatcatatatttaagtcttttataatttattgagacttgtttttgtggcctaatatatggtctgtcctatgagaacgacttatgtgcatttgaggaaaatgtatattttgttgtgtttggatgtagtgtttttcatatatatgttaggtattgttggtttataatgttttccaagtcctctatttccttattgatcttctctctagttgttttgaccattattgcaagtgaggtattgatgtctccaactattactgtagaactgtctatttctcccttgaattttgttactgtttgctttatatattttggggctgttgtttggtgcatatgtgtttataattgttataattttttgcagggttgacccttttattaatgtataatgtccttttttgcctctactaataatttttgacttaaagtctatttgccaatattagtatagctactgtaactctcttttggttactacttgcatggaatatcattttccatcttcttcttctaaaagtatttgtgcctttgaatctaaagtgaatctctgtatgtagaaaatagttgaatcctgttttttcaattcattctgcctatctctgcattttaattgaagagttcaattcatttacatttaaagtaatgactgatatgtaaggacctacttcttgcattttgccatttcttttctgtatgtcttaaaccttttcccctcagtccctccactattctattctttcatgtatagtttatatttttaagtttagattcctttctcatttcctttcctgtatttttagttattgtattgttatcctcagtgttacatttaacctcttcaacttataacaagctattttgaattcacactaccttagcttcaataatatacaaacactgtgctccaatgttgtttcattctgctgcctttacgttgttgtaacaaactacatctttgtgcatgtgtgctcattaacagatttataattatcgttttactcatttgtcttttaaatcatgtgggaaaaaggagaagttgcaaagcaaaaatgcaagaatactggcttttgtattaatctatgcagtcagatttaccttcattctttgtttcttggtagggatttgagttactttctagtgtgattttatttcagcctgaaagattccctttagtatttcttacagtacaagtctactagcaataaactctatctgcttttgtttatctgcaaatgtcttaacttctccttcatttttgaaggataattttttcagatgtagaattcttggttgatgggtgtttttttttctttcagcaccttaaatatgtcatcccactgcctcctggcaatcatggattcttctgagaaattggctgttgattttattgagcatgacttgtacatgactagttgctttctcttgttgcatttgagactctctccttgttttcatttttctggtttgattataatatgtcttgttatggatctctttgtgatcattcttcttggagttcattgactttcttggatgtataaattcatgtcttctataaagtttgggaagtttggggccattattttttcaaatattatttatgcccttttctctctctctgctcctccttggactcctattatgcttattttttggtatttttgatggtgtcccacaaatctcttaagcactgtacatttttcttcactcttttcttttctgatcctcaaactggataatttcaattgacctagctttgaattagctatttcttacttctgcctacacagagcttctgttgaaagcctctagtgaattttttatttcaattattgtattttttcagctccagaatctctacttggctccttgttattatttctatcttttaaaaatattctcttttctttatatatccttttcttgatttcctttagttctttgtccattgtttcctttagctttttgagcatatttaagatagttgaggccaggcagggtggctcatgcctgtaatctcagcactttgtgggggccgaggcaggtaaatcatttgagcccaggagttcaaaccagcctgggcaacatagtgaaactgcatctctacaaaatattttaaaaattagccagggatggtggcatgtgcctgtagaaccagctactcaggaggctgaggtgggaggatgacttcagcccaggaggcagaggttgcagtgagctgagatcacaccactgcactccaatctgggcaacagagtgagaccctgtctcaaaaaaagacagttgacttaaagactttgtctagcaaatccagtatctgtccttccttagggacaatttctgtttatttcacctgtgaatgggtcacactttcttgttcttcacatgctttataattttttgttgaaactagatatttttaatactataatatgataactctggaaatcagactcttccccttcctcagtattttgttttgttgcttgctctgggttgtaattcttgtttttttagtgactattctaaactatttttgtaaacatattatttgtcacatgtagtctctaaaatgtctttttctttagcttatggtcaactagtgttttgacagatatttctttgaacaccagaaggaataaacaaacaaataaataaataaattctgtgcttgtctttgcagattggctctgttttggggcactcctttaatgcctagacaggctaccactctgcgttagccttgactttcttcttgtacccagcataattatcagccatagataaaatcttagagtcttctcagaacttttctaagtatgcaccctgccctaggcatgtatgtggctttccaaattccctggtataagcagacattttcttaatgcctgaattcttctaagaatctttctccccagcttttcttcccaggcattcgacatatctattttttgcctccactataatgttttgccccaggtattgatgggttattcattgcctttcagtgtttatgagaaatgtcctctgcatggctaattttctacctgaaagagaggtagttgagacaaagacaagtgcttttcctcagttttttagggagcatccagatagttgaaaacagacaaatacaattctttcagaaccagttctgctctatgcctgctggaaccagtgaccatggtctcctactgaaaatgtagacggctgtcttcaagactgctatcaagttggagaaaaaagatcggggaaagggcaatcaaacattctgcaaagctccccaatgatttttttttaattgtgtatatctaagctgtacaacatgacattttgatatatgcagtgaaatggttaccctagtcatgcaaattaacatattcattatcttgcactgttaccctttttgtgcaagtatggtaagagtatctaaaatctactctgagcaaatgttcggtatacaatacaatcatataagtatagccttcatgttgtatattagattcctagacttatttaccctacatatctgcaactttgtaccctgtgacctacatctccccatttcctctctgttccctctctccacctctgataaccactgctttatactttgtttctatgtatttggctttttttaactccttttttttcttttgctttttttttttttttttgagatagagtctcactctgtcacccaggctggagtgcaatggcatgatctcagctcactgcaacctctgcctcccaggtttaaacaatcctccccagctgggactacaggcatgttccactctgcctggctgatatttttgtattttcagtagagacagggtttcaccatgttggccagactagaactcctagcatttttaagttgcctctttttttgacccatcatttgtttggttgctataaacctttgactagtttctacagttctgacaaagttgattctgacaatgtttgctcactctgtgtgtgttcgcatgagtgtgcatgttttttgtggagggatggacccttgcagttatttattgtgccattttgactaatgtcactgaccctcagactttaggccagcaatttcaacaaagtagtcaccattcccctgaaatccctctcccctttgatgccacacctacctatactatgcctattgctaatattaggtgatccccagcaccttctttccctgttcctgggctacaggtgctataatcattggagaaagttattagtgtggtgcaaaagtgattgcggattttcccattgaaggtaatggcaaaatccgcaatcactttcgcaccagccaatgcaaaactggatggactccatgaatggtgcgtgtcaaccaagcttggccaattcctcctcactgcttccacactcatttattgatgacttgtcagtttcctaacaaattcctcatagcagcttttacatgtctcatccgtcttcctctagattctatgagatctacttctcttagaacaactttgagaaaaacataagcgaaatattccaacttcttcccctttaccctctaaatcttttgagatctttaaccttattcttttcagtctcaaaagaaaaggagaaccacgtctacccaagactaacctcttcacttatgctcctaagcccaccctggcttcctcctcagaaatgacaccgttttgaatactccctttcaccatatcttaagttttttctttttctcccagctgcttccctttgctccaaatttgctcaggactctgttacctaaagagtaacttccatttgtcctaccttctcaatatcctgactatgtttctcctcccttctctttaaattctcttgagaaatcagcccctactctctttcatactgcatttgcctcctgtggagctaacacagcttgctatattcctgttagctatagatgggcctaagctagtccctcaggttagaaacccaaagttccttgacttttctctctttttcagaatctgcttagttctacctctctcctctctttcctaagacactgctctctttatactttgccaattttcaaaaatacttcatgttttttaataccttccaaactaaccctccactaatcaggtaacccttaaaaacttctctattctaattccaatctacttaacattcactgagttccctggaccaggttatggggaaatacaatgctgactaagatattatttgagttccccaaaacacatcatacagtagatgaaacttgtaaacaaatgtaccccaaatgtctgctgtcttgacatcctcaccagtggatgggcaagacctcagcatcaccttcatgttgcaaggagttccccagtgacttatgagagtctcaaaggaaagcttcccatgagtccccaaagcagcctacgagttgtagccaacatgaggcatctttcccattcttaatctccttttctggttctagtcccccacacaggatgccagcagagccatttagatgccctgcttattccaagaacatcaatgtccatgccaagggtgctggtcccggatgctcccaaagcatcagtgttgattcctggcagagcagagaaaaggacctccatgtgccctctgggccacaccacaacaccttggccccgaagcagctctgctcctgtccaaagtctcatgcagggtcttttaaacattttcagtagcatctgaccttcactgtccctaagcatattgtctcaaatctagttttgctttggtttggttttgggtctgtggggaactattcctaccatctcatccatcctgtgctccttctccctttgcttcaccacaaactcctttctccccttccccatgtaccaatgcaaaacccccataaatataagaggcaaacagatattttagctcatccttgaaggataaataggagcttaccatgtaggaaagatgaagaaaggcattttaagcagagggaaaagcagtgcaaaaaaaaaaaaaaagcaaggcattattggaagaattacaaataattaagtaatggagaactcatagcttttattcaagactttgctacagtgtcatctcctgtgaactgttccctgacaactcccaactcttcccagttcatgattctctaaatttttgctcccatggagcacatatctctaacaattcaacatttattgagctagaaattgtgtgctaagttctaggaatatagaaataataatcagaatccctgacctcaagattatggaaaagaaaagaaaataatcttgtaattataacaaagagaaagaactgcttgcaattgcatgtataactgcaatagtgatacgagggcaatgcagaggcaagccttacactagctcaatgcccaacccaccacatcagaactaactactcatttacctgtcaggctcctctatcagatgatggacccagaggactgacagtatcttatattcccagtttccagtctagaaactggtacataaaacagacctaataaatatgccatggttcctaaggttttactaattgaattagcatggaagttagcaaatattagaatatttgaacaccagaatgaataaacaaacaaacaaataaataaatttctgtgcttgtctttgcagattggctctgttttggggcactcctttaatgcctagacaggctaccactctgccttagccttgactttcttcttgtaagcaggataaatagccatagataaaatcttgttacataaactaattatttcaatctataaaatcaatggaacttaaacaagcgttccaggcaagggaagaacagctcctggtgagtccttaggccactgagtaagcccagactccctaccaaaaggaactgagctttaacattctagacagaaaacctccaagagaagggatggagatatgtccattcactcagtaaatattcatgggatgcttactatgtgccaggtgctgttcaagaatgttcacaatagtagacaaaacagacaaaaatctttgtctccatggagattacattctagtggagaggtgagaaaataaacaaaaacaaatatttaaattataaagtatactagatggtaagtactagatggtaaatccaaaggcagctggatgtgcaagggtggatgggggctgatggtgcaaaaagagtggtcacacttctttaaattctctgagcaggaatgtttgcattaatgactttatggaggcaaaagagtgagctgcatggatacttggagaaagtacattccagacagaaaggattgcaaatgcaaaagccctggcctgctcaaggaatagccaagggggctggagcaaagtgaacaagggggagaatataggaattaggtcaaagaaagagaaatggccagatcattttggtccttatagaccatagacatgattttgttttgctctgcttttgttactgttttaactttttaaactgaaatacaaagagaaaaactatacgaatcttaaatgtcagctcaatgaattatcataaaatgaacaaatctgtgtagccaaatacagatctagagataggacattatcagtattccaggatccttcctttatactccctcctattcaccacctctccctcctcaaaggtaaccactctcttgacttctgacagcatagatttgtctgtttatcaactttaaataaatagaatcatatatttgtattctctggtatctggacattctgctcaaaatgttgcttgtggtattcacccatgtgattcagaggaaagaggaataaagatgacaaataacagtgtgttaaaatgctgatgggaaagatgttgatgacagcaatgttcatgtgcctggaacccatatgacaattcatgaaagagagaggaagtgcaagctcacccaggagctgagcactaggactccaagagacatttccttccctattcagctcctcctataagaaataagaaaccctcagaaatgacaactttccatgctcatggattggaagaatcaacatcgttaaaatggccataccacacaaagcaatttctagattcagtgctattcctatcaaactaccaatgtcattcttcacagaattagaaaaaccattctaaaattcatatggaaccaaaaaaagagcccaaatagtcaaagcaattctaagcaaaaacaaaaaatccagagacatcacactatctgactttgaaccataccataagactatagtaaccaaaacagcatggtaccgttacacaaacagacacatagacaactggaagagaacaaaaaactcagaaataaagccacacccttacaaccatctgatttttgacaaggccaacaaaagcgagcaatggggaaaggactccctgttcaataaatggtgctggataactggctagccatatgcagaagattgaaactggacccttacctttaaccatatacgaaaattaactcaagatggatcaaatatttaaatgtaaaacctcaagctataaaaatcctagaaaaaaataggaaatacccttcttgacactggccttggcaaagaatttttggctaggtccccaaaagcaattgcaacaaaaacgaaaattgacaagtggaacctaagtaaactatagagcttctgcacagcaaaagaaactatcattaccgtaaacagacatcttacagaatgagagaaaatatttgcaaactatgtacccaacaaaaggtctaatatccagaatctataaggagcttaaaccaataagcaaaaagacgaataaccccattaaaaaatgggcaaaggacatgaacaggcacttcttaaatgaagatatacaagcactcagcaaacatgaaaaaatgctcagcatcagtaatcatcagagaaatccaaatcaaaaccacaatgaaataccatctcacaccagtcagaatggctattattaaaaagtcaaaaaaaagaacacaatagatgctggtttggtttttgatatggtttgattgtgtccccacccaaatctcatcttgaactgtagagctcccattattcccacatgtcatgggagggacctggtaggaggtaattgaatctgggggtaggtctttcctgtgctattctcatgatagtgaataagtctcatgagttctgatggttttgtaaaggggagttcccctgcacatgttctctttgcctgccaccatgtaagacgtgactttgctcctccttcaccttccaccatgcttgtgagtgccatggcctccccagccatggggaactgtgagtcaattaaacatctttcctttataaattactagtcttgagtatgtctttatcagcagtgtgaaaatggacaaataacacttttttgactttttaataatagccattctgtcagaatgacagctggaagagaacagaaaattcagaatacactaatacacttttttgtatttttgtatagccatatgcagaagattgaaactggacccttcattctttcagaatgtctattattaaaagtcaaaaaataaaaaaaaaacaggtgctaggtcccacttggtgaggttgcagagaaaaggaaacagttatacactgttattgggaaatataaattttcactgtggaaagcagtttggagatttttcaaaaaacttaaaactgagctaccattcaacccagcaatcccattactgggtatatagccaaaggaaaatagatcattataccaaaaagacacatgcacttgtatgttcatactatgctattcataatagcaaagacacagaatcaacctaggttccaatcaatgatggattggataaagaaaatttggtatatatacaccatggaatactaaccagccataaaaaagaattaaatcatgtcttttgcagtaacacgggtggagctggaggccataatcctagcacaccaacacaggaacagaaaaccaaatactacatgctctcacttataagtgggagctaaacactgagcacacatggacataaatatgggattaatagacgctgtggactactagagggggaaggaagggaacaggtaatgggttgaataactgcctattagttattatgtccactatctgggtgtgatatacccatgtaacaaatctgcacatgtacccccatatctaaaataaaagttgaaatttttaagaaaaagaagcaagagatcctgagaaggttgaggtaattgttatagttattcattcattgacccactagaacatttccacagactctactatgtgtcagacatggtgctgagtactgacatgcaaggctaattaaggcgtggtcagttagacaaacaggtgaacaaaactacaaaatagtgtaataattgctaagaatttgggaaaggatgctaaggaagcatcttctttaagaatcattgtgaccatttcaccgtttttgcttaaacattgatagttctgaataagttcacaagaatgtggccatcatgtgttactttgaaattatatttattatttctatatgtatccattttgtctcctcaataactaaactataatctttctgagagaattaaaaaaaaatcttctggtatcatgaagacagcacaaagtcactggagtcagaagacctgggtttgaatcctgactctgctattctttagctgtgcaaccctgggaaaattagttaacttttctgtagctcagttcctttatctataaatggaagtaataatatccatcctgcctgcctcacagactgtagtcagcgtcaatgaaataatatataagaagaactgactatcctataaatccctgatattagtccctgttaccagccttctaagttgcacaagcctactatgttggacacacagtaagtaatcagtaaatatcaggctttaattatgctttattagcaaagacttgcagtttttggagtctatagtttcctgtccccctcaacctaatgtccaaggacttcagaggctaggatcacaaagtatagttatgacctaggagtgaccagccagtgtaggacccagcgtggactgggccggtttcatctagactagctgcctactaaccaagagtggctgacattttgctggaggtgaagctctgggactgtgattattcatttagaaacatctcctaccctttcctactctgtcatatctctgagttttggtatcagagagctctaacagactggcagcgttaggtgaaagggtgcaggacttggcagggagatggtcaggaacatttttaaaacctttccttctgtgtttacagggaatgtagtttcacaaagcagcttaaccccattgatggtgaacgggattctgggggagtcagtaactcttcccctggagtttcctgcaggagagaaggtcaacttcatcacttggcttttcaatgaaacatctcttgccttcatagtaccccatgaaaccaaaagtccagaaatccacgtgactaatccgaaacagggaaagcgactgaacttcacccagtcctactccctgcaactcagcaacctgaagatggaagacacaggctcttacagagcccagatatccacaaagacctctgcaaagctgtccagttacactctgaggatattaagtaagtcaaaatatggggtttaattccatatggactgaaaaatatacatgtattccaatcctatgtgacttcaaatgtgcactgtcgcctagtggtaaagaatatggcatttggagtcattgagtcagtgtcaacacaatgacactgcaaagccagttaatgacagagctgaagacagagcctaagtcttgtgtcccagcccagaattacttcactccgataaaatggtcttcttcaaccagaaatgtagcagaagtaatggaagtcaaatatttatgatagtgttgccttgtgcactacatgtatttgccatgtaattctcacaaagactccatgaggtaggtacagaccttatacccttgaggcacagcctcagtcacagtgatttgcctacaagtcacagagatagtaatggtagcacttcccacataactacctgccacgacacctcccttttcacaaaggctagtctgacccagtagagtggtcagtgtacagaacagtggtctacctagaaagttatctgcaaagataggctgataatgagaaacatcctttctgtcaaggttatttaatttttaacaatattttcccccgatggctcatattaatcaccagtcaacaatctgccttcccaagattaaaaagaatgaaaatgttatcaacataaaattatggaaactataatgagatttcttatgagtcaatatcagaaaaatacctctctagcaatcagtgatattcagagatgccattaatggctttagaataatcacttagcaggagattcaagcattaaattggcaatcagaccagaaaacattaaaggccacggaaattctgtaatttttatccacttgagggcctgtagtgtctaaaattcactcagagtcctttgggttaagacatggtactcaaaaaagcactgttaaaataaaatgtctccacagacagattacatgttaacttttagtatcccctgaatatctggtaggtttatcgtgttagattagtcaaaatcatgttcttgaagaatagaacaccaaacaggtaaatgtaatgggaaagaggtgatgtctggaaaacttctatacaagcgattctaactaaaaaggaaaaatcaccctggggcaatgtattactttcctgaggctgctgaaatagaaataccataaagtaggtggcgtaacagaaattcatattctctcacagttctggaggccagaagtccaaaatcacagtgtgggcagggctgtgctccctctggaggctgtagcgggcaatctgctctttgcctctcccggcttctggttgctgtcaacactccttggttttctttggcttgtggctgcatcacaccaatctctacctccatagtcaggttgcctccttcttttctgtctgtctcaaacatccttttgcttttctcttatgggaacatttgtcattgggtttggggactatccaggttatactggataatgtcatataacataattccatctgcaaagaccctttttttccaataaggtaatattcagattctgggaattagggcgcagacagatcttttctgaggtcattattcaacccactacaggcagaatcaccctgggtgaccagtaattatcaaggcagtgtaggacactggagagaagagagactcatccaatggaaagcctgaaatgggtaccaggcttcatcacatttgctgagataatgttcctctaacattgttgagaagaccaggtatgacttatcttgtgacagccaccctcttgaggctcaatgctgatctctttcagggctttttagagtgccatctccttcaaagtcacatacacagagaactgtgtaagctacaccaggtagttttacaatagtgcaaaggaatttcaaggtataagttatataggtttgatttttaacattgatcaatctcttggtatgtgccaggatatgaatggcaaagatttgattttatgggccaataccaattaattgggagtgactgctaacatggtttggctctgtgtccccacccaaatctcatctcgaattgtaatccctacatgtcaagggagggacctggtgggtggtgatttgatcatgtgggaggtttcccccatgctgttctcatgatagtgagctctcatgaaagctgatggtattaagcgtggcacttccttgccctttctctctctctcctgctgccatgcaagacgtgacttgcttccccttgcccttccgtcatgattgtaagtttcctgaggcctccccagccatgtagaactgtgagtcaattaaacctctttcatttataaagtacctagtcttgagtagtatctttatagtatcgtgaaaacaaactaatacaactgcctagagttcagtgttaagaaaatcttgaagccatgataggtttattaattgagtcaacaatatttgttagacatggataacgtccaaggcactgttataggcacctggaatacatcagtgagcaaaacagacaaagatcactgtcctcatggagcagacattctggaagggaagtagaggaaggtaacaagcaattcacataacatataaacaagtgatacagcatgtaagaaagccctgaatggtatgaacaaaggagagattagaacagcataagaagcatcaagagtgccagggagcaggggacaattttaaaagaagtgatcagaacaggcttcattgaaaagatgacatttgagccaagacctgttggaagtgaggaagtgtgccacgcagataactggaagacacgccatccgcatagatagcaagatcccctgtgcctagactactcaagaaacaccaaggaggccaaacgtccaggagcagagtaaggggaaggtaatagaaaatgaggccagaaaggaaacaggggccacatcgcaaaaggactgagagccatcacaaagactttggcatctactctcagtgacactgaaaaccatcagaaggttttgcaaacaagtaatatgatttgacttacttgtctaaaggattcctttggctgatctgttgagagtagagttcaagggggaagggtagaagccaatgggccaattaggagaccattgcaatagtccaaacaagagttgatgctagcttggatcagggtgatagcagtggagatggtgagaagtggttacattttggacatatgttgaaggtaaagccaccaggatttcctgatgtgggagtatgagatgaagatatgaatcagcgataactccagaggttttggcctcagtgataggaaggatgcagttgtcaacaagtcagatgggtaaaactgcaggttgagaaggtttgggagagaaaaacgggagtcctttagactataccaagtttgagatatacttacacacttatatacctgtggaaatgtccttacatattcattaagtggaaaaaggtaacaagatggatttttttttcagttcagccatcaacactggatgagggagatgtgattttcatgccaaatatttgccatccctgtactaggcactgtctcatttattcctcaaaattacctgagaagtgggtattattacctggtcttacagataaggaaactgaggcttggatatagcaataatttgtccgtggtcatgtagccagtaaattacaaaattcaggtcttgactccaaatccaacacttttcccatacatgaatactctgttctggcaatatttcagtacagatactccacaactcctactcaactaagctcaaagtactactcggtctcttctaatcagagaattggagtcattctcttcctggttgggtcatctttacttcaaacctcaggccaaggctaagtcagtggccttttctgtcttgctcccatgttcccattggttcacagttacatcttactaggcaatatttcctggtctttgctctcagaaatacctacatcacatgtcatctcacatgcctagatacgccgcacttctttgctccccagaattgcttgcttgctttctcaccttattcacttcttccttccccacttctttggttctcagcattttcctttctgtcttgctgaccttctacatctgagtctctttctcactattggagccagctttagatacaataggaaccaggatccccatagattcaaattccccaaggaagtgatgcttccatcttccaccccaattaggtaattctgatagcagaggaaacaggactcttccacctggtctcttggcttctcacatcactgagttgccctcagagttcttggcttggtctccaaattgtctttacacaggggcagagtgcaaggactagaaaggaacccagggataaactggagaccagaaatataaaataaccaccccaaaactacccagctagttgatggaaacctcagtctctcccttcccacttcttctgctgactatcctgccccatactgatgtcccgcatcatttggtcatcccagaccttgctaccatcaattaggcaatataagcagagtcatttacagagtctacagaccataacacacagcaaaggtgaaatacaaaacattgaggtgaaggatatttttcacagggggttgagccaagacatttgtccttaatctggatcttttttttttctgcaaacaggacaactgaggaacatacaagttaccaatcacagtcagctatttcagaatatgacctgtgagctccatctgacttgctctgtggaggatgcagatgacaatgtctcattcagatgggaggccttgggaaacacactttcaagtcagccaaacctcactgtctcctgggaccccaggatttccagtgaacaggactacacctgcatagcagagaatgctgtcagtaatttatccttctctgtctctgcccagaagctttgcgaaggtaacagcctgcctcaggtctgagagccttgagcagctatggggtttaacgcgtcctcacatcctacgtaatttccaatacagtggcccagtgggaggcagaaaatgctgctgggaggggacagatgccctctggagctctgcatctctcagtactcccagaggactctccttccttcctctccattccccaacccctcgtccaacctactcagaacccaaaatcaaaggcctgggaatgtaggattgctttctctccctaactccactgggccccaccctcccctgcctgccacataggactcccaccccagagcctccggctatagacaaacttacctagtccccaaagatggcctagaagaggctccacggaggctccaagaacagtgggcctcacttgatgtgtctcaaatgtcatttcttttttctcttttcagatgttaaaattcaatatacagataccaaaatgattctgtttatggtttctgggatatgcatagtcttcggtttcatcatactgctgttacttgttttgaggaaaagaagaggcaggtttcctttcttcctacttgtctcttctccaaggttccagtgattgagagtttggggcctctgattcccaaggatctcttgtggaagacaggaggagggagggaggctgcaaaccctggctcagctagtccactgagataatccctgggtgtgatcttgcacctgctaatatcctgagagaaatgtcctactgggaaaagtgggaccctgtctcagggctgcttgcccttccttttgggtcccctcccaccacatcccaacactcacggggttaggggtgaaatgcctctcccactgctgtcacacatttcaattttctggttttatttttcagattccctatctttgtctactcagcgaacacagggccccggtgagcattcagactcttaactctccatcataaagcagatgggaagagccaaatggaagagagagggggatggcagagggctggataatgacagaggaaggagtcagaatgtcattactcagaccacatgctgtgaggggagatgatctgtaatcatgggtcctacatggttcacaggcataggcatgtgaaccagtcactcacacagtttctcttggtgatatcaggttcattcaccaccctgctgatggagaaactaagtcccagtgaaagggatcatcccttgtcacccagcaagtccagggcacaggcaggattagagcatccaaggcacaaaaccaaactgtctgactgcatcattactgttcagccagggtctgggcaatggatagacacagtggaaagagaaaacatgatatagaaacacaaacacaggctctggactcagattggctttgggtctcatttcatgcatgagtgatgcatgacatcacttgcagaggaaaaggcataaggtttgaagtcagaagacgtgcatttgagttgctgtttcatcactgtctgtatggctttgcacaagtcagttaagttttctgagcctccagttcctcatctccaaaataatcaaatccgctgtagagacctctgaaaagcttaataatatcccaaatgtgaaataactggctccattatgtttgccaatgaggtgtctttagcccttccataggcagggctatttggtcccaggagcttcctgacccacatgtgaagcctgagggagactctgaagctttaggggacctcaacaccaccttctaccccaagagatgtggtcagaaatagaccacatgactgagaaggttcacccagagctccaaagactgtcaagaacgaatgatccctcaggaaaggagatgcttcaaacacctgcctatctggggacacagtgtgctctggggagggagaagtcctgggagagaagtcccagagtccttgtgccattgactgtgccttcctatgttaacagcagagtccgcaaggaacctagagtatgtttcagtgtctccaacgaacaacactgtgtatgcttcagtcactcattcaaacagggtgagtcttttcagctttatatgccattgttgtcagttttacagccattgttcacaaacttgtcaccataaccatctgactgaacaaatgaccaccgaggggaggagaagacagccacagcgacaggggctgcaaagttatgcgctagaccactctggtgtctgcctttctcacccttaagggaatgtttattcataccctgccttacacagttctccaaccgcttgatgcatcagtaagtcttgtcccttcagcttaattacaagccgactgaaagtacaaattatgtcttcctctctcttgccctatatcctagcataatgatcagtaaatacttgctgaatgggtcagagttccactaagtttgaaagtttcctatggacgtagttccatagcaggtggctgacttctcactctgcatgtaggggtcttaggggagttcagaagtagtctctcaagaggggaagggggcacagtagaggccactaaaccatgagcaatggttcacccctcccctctcatctagcagcataacaggatggctggtcaagcatcagcaactcatctgtcatgtatcagcaactccccaccacccctaaataaaggacctgcaggtggcacatctctaaataataccatacattttgagaggccagttttctgaaaaataagccaggaaagcttagcattttcaaaatgatgtaagcaatgatctagctagaaatcttggattcccttcacctatatttgcaaagtatgatccttgatgacaggaagcaagaaggggtactctcacttgctcagacatttcttttgcctttgcaaattcctcctgaaaacaagtcaactcacactctgacaaatcaaaaaactaatttcccacaaattggttagctttctctttagcaaaaagaaaaaaaaaatgtgctttggagagtttgaggtttttttgttttttgttggtttgttttttgttttttggtttttttttttttttgagacagagtgtcactctgtcaccaagggctgagtgcagtagcacaatcacagctcactgcagcctcaacctcctcatgctcaggtgatccttttaccttggcctcccaagtagctgcgactacaggcgagcaccatcacatcaggataatttttctactttttgtagagacggggtttcaccatgttgcccaggctggtctcaaacttctgcgctcaagtgatccgcctgcctcgtcctcccaaagtgttgggtttacaggcatgagccactgtgcccagtagagatcttgataattctctaaatacttcttcattaatttaaagtgtcaaaatctttgagtaggttctttgagggccgtagggacttctgctattatttctgtaatgtgcattccaggcagagccattcttaaggccaagtgttcctattctaccaattccccatgcttgagaagaccccaatgacatgatgacaaggcagttagaattatagcaaaagatggagcaggcaaaatgggtagtttcagtcatagctagtaaaaatttgagacaaaacatataataaactatctggtatataagttttttcttaaaaatggaggaaggaaagtagagctggacaaaggacaagaatacttccttcccttcatacagcaaggctgcctttctctggctcttgagcccattggtttgctgcagtgttgctgttctgtttggggctcaggaaatgccactaaatcctcacaagtttgatagctagtcgtgcttggtcttccactgaacattccccagccttcctctggaagaactttgacatattctcttttttgtcacacagtctttcctaagaatatatctatgcattaatctctttgtctctgtgtaagccaaattggtatgattctttttacaggaaacagaaatctggacacctagagaaaatgatactatcacaatttactccacaattaatcattccaaagaggtaagcccacgattgctccatgtttttatattcttacctctctccacagacctatgatttttcaaataaagtaaaaataaaagggtcattttacagatgcacaaacagcagcagcatgcggaaagtctcaggacatcaccaaaacataatcaagaagttattttgtattaggatcaccatgcataactgagttttcaattacatgtttttaaatttaatcctgccctatgctatcaatatctctattatctgcctctctgtagtctccagtcctctctctgtagttatgaggggtgggctgaggttccagttccaattaacctacctcatcttcctctttttcccacagagtaaacccactttttccagggcaactgcccttgacaatgtcgtgtaagttgctgaaaggcctcagaggaattcgggaatgacacgtcttctgatcccatgagacagaacaaagaacaggaagcttggttcctgttgttcctggcaacagaatttgaatatctaggataggatgatcacctccagtccttcggacttaaacctgcctacctgagtcaaacacctaaggataacatcatttccagcatgtggttcaaataatattttccaatccacttcaggccaaaacatgctaaagataacacaccagcacattgactctctctttgataactaagcaaatggaattatggttgacagagagtttatgatccagaagacaaccacttctctccttttagaaagcagcaggattgacttattgagaaataatgcagtgtgttggttacatgtgtagtctctggagttggatgggcccatcctgatacaagttgagcatcccttgtctgaaatgcttgggattagaaatgtttcagatttcaattttttttcagattttggaatatttgcattatatttagcggttgagtatccaaatccaaaaatccaaaattcaaaatgctccaataagcatttcccttgagtttcattgatgtcgatgcagtgctcaaaatctcagattttggagcattttggatattggatttttggatttgggatgctcaacttgtacaatgtttattagacacatctcctgggacatactgcctaaccttttggagccttagtctcccagactgaaaaaggaagaggatggtattacatcagctccattgtttgagccaagaatctaagtcatccctgactccagtgtctttgtcaccaggccctttggactctacctcagaaatatttcttggaccttccacttctcctccaactccttgaccaccatcctgtatccaaccatcaccacctctaacctgaatcctaccttaagatcagaacagttgtcctcacttttgttcttgtccctctccaacccactctccacaagatggccagagtaatgtttttaatataaattggatccttcagtttcctgcttaaaaccctgcaggtttcccaatgcactcagaaagaaatccagtttccatggccctggatggtctggcccacctccagcctcagctagcattacccttctgacactctctatgtagcctccctgatcttctttcagctcctctattaaaggaaaagttctttatgttaattatttacatcttcctgcaggcccttcctctgcctgctggggtcctcctattctttaggtttaattttaaatatgtcacctcctaagagaaaccttcccagaccactctttctaaaatgaatcttctaggctgggcatggtggctcacacctgtaatcccagtactttgggaggccaaggggggagatcacttgaggtcaggagttcaagaccagcctggccaacttggtgaaaccccgtctttactaaaaatacaaaaaaattagccaggcgtggtggtgcacccctaaaatcccagctacttgagagactgaggcaggagaatcgcttgaacccaggaggtggaggttccagtgagccaaaatcatgccaatgtattccagtctgggtgacagagtgagactctgtctcaaaaaataaataaataaaataaaatgaaatagatcttattattctgttacaccttctatgtcatttatcatatcattaaatatttatttttacttttttaacatctatttctcccactataccctaagctcttcagaaacagagacaataactgttttgtttatcaccgtaaccctagcacctaacacagtatctagcatatagcaagtgttcaaaaaaattttttaataaataaatgaatatgtaatggggttttgtgaaaatgaaataagacaatacacctggagtccttagcatagctctcagccacataaaggagctcaataaatgtcagtcagcattgttggtataattactgatacaattagtataaattaataatagtaaaaattaattattactgaattacacagaatcatctcacaaaccttcagcacaacaagacgtgacagagatcagctctcaagaccacaggattcaaagggaaggggttggagagttggaatggggaaaaactgaaataatggctgaaaagaatagaaaaaaacaaagctcatcaaagttaattaatctcaaataccagccatcaattacagtattagtcagtggagtaggacaagatagggaagcttaatcaagaagaaggaagagtttccaaggaataggttctgggttcatggagacttcaaagaaaagagtaaaaagagggttactgccatgttcgtgcaacatgacctgaagctcaggaaatctcactgggcaggtaagagagtgctttcctttcaaggggacccaaaaaaaaaaaaaaaaaaaaaaaaaaaaaaatatatatatatatatatatatatatatatataaagctttttttgtgtgtgtggaaactttgaagaattccaaggttcttcagagagggaaaaggaataatctgtaaagtcagtgcagatagaaaaatatttgcaacatctagggtgcccaaaaccagcaagaaaattaggggatatgtcatggaaggcacaactaatccatctagtcagaaatctaccagaatctaccctgaatctggactgcactggggaggatcacaaacaaaacaaaaactaagggcgtatctatagacatctaagaggtgagtaagaaaagaactcataagaaagctaagctcacttgtctttatagaccagctactaaaacatagaattcctgatgttatatttctttcaatctcttcaaccttctccctttttatcataaataccacactctcttctcttggcttctgtgacactacattccccgagttttactccttccttcctagctgcttctcaggctctttgcagatccactgcctcctccacaggaccagtaaagactgaagctaaggctcacatgtgggtcccattcacttctccatctaagtactcttcttatctgatgtcagccattcctattgccttaatagcctttataagctaatggttcccaaacacatctttagtcctgacctcctggcttacctcattaactgcctacttggcatcaccatttgcatatctggtagatatatcaaagttttttaaaaaataaaaactcttgggcagatgtggtggctcatgcctgtaatcccagcactttgggaggccgaggcaggtggctcacttgaagtcaggagttcgagaccagtctggccaacatggtgaaacccggtctctactaaaaatacaaaaattagccgggtgtgatgttgggtgcctgtaatcccaggtactcaggaggctgaggcaggagaatcacttgaaaccaggaggcggaggttgcagtgagccaagatcatgccactgcactccagcctgggcaacagagtgagacactgtcaaaaaaaaaaatcaaacctcttgatttctcttatcaagccttttcttctactatgctttttcatatcagtaaatggtatcattgttatgggacactcttgaacagatctcctttacaaaactgaaaactacccagtactcaccatataactaatcatttttgttttcttgtgggaaacaaatggatttaatcaacaaaaacctaatctattgttctaaagttaaatacattaagacccagatgccccattcctaaaagatgaatcatgcattttgcaagcagggaagaaaacatgcaatgcttataaaattcctaccaaaaaacaaactttctttgcccaggaggtaagcttgttctttaatatttttattgtagaattaaggaaatggtagccccattaaactactttgaataaggtaagatggctgtgattggctatcctggaaaggtaataaaagggaatagaaatactcttcccactctgccagcccccagtcattcccactaggaggtcacaaagtgttgacaaggcctacaagacccctactcacatctctactccttctttcacagcattccagccacactgttctttattcagctcctagaataatctagactctccttcctacttctgtgccttatggatactgggaccacatccctatgaggcaacaattagctggtgctgagtagcctctgttctattctaaatggggcttgcacttcacatttcactcctggcctgccctgcctgcttcacttacttaagatacctacctagtactgaaaatagttaagtttccaacctcttacctacaccatgaagctttgccccacatcatgttggtcaaaagagcacattaactagtcccaaaataacaatgtctgatctcacttgtccacaccccatcccaccctcaagccaacacctgaaccccgtgtagctttaggacacttacttgaagctttcatcatttagcctccctcagggttcagtgtatactttgatatgaggaagcagggccacagctagatgcagaacagagagaaggctaccctgtccaaggtcactggatagacatttcaccctgagtttcaagttgatgaaaagaatggactaagaagtgacttctcaaatggggagggagcaagtctgaccccctgaatttccccttcccagaggccatctaaaagcactctctgtgggaagaaaggaaggggacatcatcactgaccttttactaccagacgactagaatggccacatccaaagcttttgcttcctcacccctagcccactcttctgaagctgcattcttgaaggataccaacctctagaggcagggatcttttctctgcattctggtgctctctgcagcatttgacattacacaatccccccatcacccttgaggtttccctccttttaatgcccattaagtcacctcatcctacttttgtctttctgtctcctccttacctctccttagcttggtttctcttattatttatgtcccataattagatttgtttccctaggttctgctgactggatattttcctggatgtctcgtaatcaccttaaattctgtttttcattctccctttgacttctaatgacccaaggaaagtagaacatccctctcaggatccaacaacaatccaaaacacaaggtgaattcatggcaacttaaaacacaaggtgaattcatggcaatttaagacacaggaggaaatagaggggcagccaagatggccgaataggaacagctccagtctacagctcacagcgtgagcaatgcagaagacaggtgatttctgcatttccaactgaggtaccgggttcatctcactgggtagtgctggacagtgggtgcaggacagtgggtgcagcgcaccgtgcatgagccaaagcagggcgaggcatggcctcacccaggaagtacaaggggtcagggaattccctttcctagtcaaagaaaggggtgacagacggcacctggaaaatcgggtcactcccaccctaatactgcacttttccaacgggcttaacaaaccgcacaccaggagattatatcccacacatggtttggacggtcctacgcccacagagcctcactcattgctatcacagcagtctgagatcaaactgcaaggtggcagtaaggctgggggaggtgtgcccaccattgccgaggcttgagtaagtaaacaaagcagccaggaagctcgaactgggtggagcccaccacagctcaaaaaggcctgcctgcctctgtatgctccacctctgggggcatggcacagacaaacaaaaggcagcagtaacctctgcagacttaaatgtccctgtctgacagctttgaagagaatagtggttctcccagcatgcagcgtgtgatctgaaaacaggcagactgcctcctcaagtgggtccctgacccctgagtagcctaactgggaggcactcccccagtaggggcagactgacacctcacacggctgggtactcctctaacacaaaactttcagaggaacaatcaagcagcagcaattgcggttcaccaatatctgctgttctgcagccaccactgctgatacccaggaaaacagggtctggagtggacctccagcaaactccaacagacctgcagctgagggtcctgactgttagaaggaaaactaacaaacagaaaggacatccacaccaaaaacccatctgtacatcaccatcatcaaagaccaaaggtagataaaaccacaaagatggggaaaaaacagagcagaaaaactggaaactctaaaaatcagagtgcctctcctcatccaaaggaacacagctcctcaccagcaatggaacaaagctggatggagaatgactttgatgagtggagagaagaaggcttcagaaaatcaaactcctccaagctaaaggaggaagttcgaaccaatggcaaagaagttaaaaaccttgaaaaaaattagtcgaatggctaactagaataaccaatgcagagaagtccttaaaggacctgatggagctgaaaaccatggcacgagaactatgtaacgaatgcacaagcctcagtagccgatgcgatcaactggaagaaagggtgtcagcgatggaagatgaaatgaataaaatgaagcaagaagagaagtttagagaaaaaagaatagaaagaaatgaacaaagcctccaagaaatatgggactatgtgaaaagaccaaatctacgtctcattggtgtacctgaaagtgatggggagaatggaaccaagttggaaaaggctctgcaggatattatccaggagaacttccccaacctagtaagggaagctaacattcaaattcaggaaatacagagaatgccacaaagatactcctcaagaaaagcaactccaagacacgtaattgtcagattcaccaaagttgaaatgaaggaaaaaatgttaagggcagccaaagagaaaggtcgggttacccacaaagggaagcccatcagactaacagctgatctctcggcagaaactctacaagccagagagagtggagaccaatattcaacattcttaaagaaaagaattacaacccagaatttcatatccagccaaactaagcttcataagtgaaggagaaataaaatactttacagacaagcaaatgctgagaaattttgtcaccaacaggcctgccctaaaagagctcctgaaggaagcactaaacatggaaaggaacaaccggtaccagccactgcaaaaacatgccaaattgtaaagaccctcgatgctaggaagaaactgcatcaactaacgagcaaaataaccagctagcatcataatgacaggatcaaattcacacataacaatactaaccctaaatgtaaatgggctaaatgctccaattaaaagacacagactggcaaattggataaagagtcaagagccatcagtgtgctgtattcaggaaacgcatctcacgtgcacagacacacatagtctcaaaaaaagggatggaggaagatctaccaagcaaatagaaaacaaaaaaaggcaggggttgcaatcgtagtctcagataaaacagactttaaaccaacaaagatcaaaagagacaaagaaggacattacaaaatggtaaagggatcaattcaacaagaagagctaactatcctaaatatatatgcacccaatacaggagcacccagattcataaaggaagtcctgagtgacctataaagagacttagactcccacacaataataatgggagactttaacaccccactgtcaacattagacagatcaacgagacagaaagttaacaaggatacccaggaattgaactcagctctgcaccaagcagacctaatagacatctacagaactctccactgcaaatcaacacaatatacatttttttcagcaccacaccacacctattccaaaatcggccacatagttggaagtaaagctctcctcagcaaatgtaaaagaatagaaattataacaaactgtctctcagacaacagtgcaatcaaactagaactcaggattaagaaactcactcaaaaccactcaattacatggaaactgaacaacctcctcctgaatgactactgagtacataacgaaatgaaggcagaaataaagatgttctttgaaaccaacgagaacaaaaacacaacataccagaatctctgcaacacattcaacgcagtgtgtagagggaaatttatagcactaaatgcccacaagagaaagcaggaaagatccaaaattgacaccctaacatcacaattaaaagaactagaaaagcaagagcaaacacattcaaaagctagcagaaggcaagaaataactaaagtcagagcagaactgaaggaaatagagacacaaaaaacccttcaaaaaattaatgaatccaggagctggttttttgaaaggatcaacaaaattgatatacctctagcaagactaataaagaagaaaagagagaagaatcaaatagatacaacaaaaaatgataaaggggatatcaccactgatcccacagaaatacaaactaccatcagagatactacaaacacctctacgcaaataaactagaaaatctagaagaaatggataaattcctcgacacatacactctcccaagactaaaccaggaagaagttgaatctctgaatagaacaataacaggatctgaaattgtggcaataatcaatagcttaccaatgaaaaagagtccaggaccagatggattcacagccaaattctaccagaggtacaaggaggaactggtaccattccttctgaaactattccaatcaatacaaaaagaggaaatcctccctaactcattttatgaggccagcgtcatcctgataccaaagccaggcagagacacaaccaaaaaagagaattttagaccaatatccttgatgaacattgatgcaaaaatcctcaataaaatactggcaaactgaatccagtagcacatcaaaaagcttatccaccatgatcaagtgggcttcatccctgggatgcaaggcaggttcaatatacgcaaatcaataaatgtaatccagcatataaacagaaccaaagacaaaaatcacatgattatctcaatagatgcagaaaaggcctttgacaaaattcaacaacgcttagtgctaaaaactctcaataaattaggtattgatgagacgtatctcaaaataataagagctatctatgacaaacccacagccagtatcatactgaatgggaaaaaaactggaagcattccctttgaaaactggcacaagacagggatgccctctctcaccactcctattcaacatagtgttggaagttctggccagggcaattaggcaggagaaggaaataaagggtattcaattaggaaaagaggaagtcaaattgttcgtttgcagatgacatgattctatatctagaaaaccccattgtctcagcccaaaatctccttaagctgataagcaacttcggcaaagtctcaggatacaaaatcaatgtacagaaatcacaagcattcttatacaccaataacagacaaacagagagccaaatcatgagtgaactcccattcacaattgcttcaaagagaataaaatacttaggaatccaacttacaagggacatgaaggacctcttcaaggagaactacaaaccactgctcaatgaaataaaagaggatagaaagaaatggaagaacattccatgctcatgggtaggaagaatcaatatcgtgaaaatggccatactgcccaaggtaatttatagattcaatgccatccccatcaagctaccaatgactttcttcacagaattggaaaaaactactttaaagttcatatggaaccaaaaaagagcccgcatcaccaagtcaatcctaagccaaaagaacaaagctggaggcatcacgctacctgacttcaaactatactacaaggctacagtaaccaaaacagcatggtactggtagcaaaacagagatataaatcaatggaacagaacagagccctcagaaataacgccgcatatctacaactatctgatctttgacaaacctgagaaaaacaagcaatggggaaaggattccctatttaataaatggtgctgggaaaactggctagccatatgtagaaagctgaaactggatcacttccttacaccttatacaaaaattaattcaagatggattaaagacttaaatgttagacctaaaaccataaaaaccctagaagaaaacctaggcattaccattcacaacataggcatgggcaaggacttcatgtataaaacaccaaaagcaatggcaacaaaagccaaaattgacaaatgggatctaattaaactaaagagcttctgcacagcaaaagaaactaccatcagagtgaacaggcaacccacaaaatgggagaaaattttcgcaacctactcacctgacaaagggctaatatccagaatctacaatgaactcaaacaaatttacaagaaaaaaacaaacaaccccatcaaaaagtgggtgaaggacatgaacagacacttctcaaaagaagacatttatgcagccaaaaaacacatgaaaaaatgctcatcatcactggccatcagagaaatgaaaatcaaaaccacaatgagataccatctcacaccagttagaatggcaatcattaaaaagtcaggaaacaacaggtgctggagaggatgtggagaaataggaacacttttacactgttggtggggctgtaaactagttcagccattgtggaagtcagtgcggcaattcctcagggatctagaactagaaataccatttgacccagccatcccattactgggtatatacccaaaggactataattcatgctgctataaagacacatgcacatgtatgtttattgcggcactattcacaatagcaaagacttggaaccaactgaaatgtccaacaatgatggactggattaagaaaatgtggcacatatacaccatggaatactatccagccataaaaaatgatgagttcatgtcctttgtagggacatggatgaaattggaaatcatcattctcagtaaactgtcacaagaacaaaaaaccaaacaccgcatattctcactcaaaggtgggaattgaacaatgagaacacatggacacaggaaggggaacatcacactctggggactgttgtggggtggggggaggggggagggatagcattgggagatatacctaatgctaaataacgagttaatgggtgcagcacaccagcatggcacatgtatacatatgtaacaaacctgcacgttgtgcacatgtaccctagagcttaaagtatactaataattaaaaaaaaaaagaaatagaacatctattaaactatatttcctagacttataaagctaggacaatgcctctgtttttgttcctcagctttttgttgggcagaaatagctttgaaggaggcagagctggatttaatcagtgttagcatttcagaaatagaattcatctttcagaaatataatccacaggcattggtgacttgactgcatataggagatgaggaagagggactatgatgagttaaaagtgtcttagtggtagactgaaattcaaaaatgaagaa

SEQ ID NO: 750 - DNA, 2735 bp, Homo sapiens
acagaagggcaaaaacattgactgcctcaaggtctcaagcaccagtcttcaccgcggaaagcatgttgtggctgttccaatcgctcctgtttgtcttctgctttggcccagggaatgtagtttcacaaagcagcttaaccccattgatggtgaacgggattctgggggagtcagtaactcttcccctggagtttcctgcaggagagaaggtcaacttcatcacttggcttttcaatgaaacatctcttgccttcatagtaccccatgaaaccaaaagtccagaaatccacgtgactaatccgaaacagggaaagcgactgaacttcacccagtcctactccctgcaactcagcaacctgaagatggaagacacaggctcttacagagcccagatatccacaaagacctctgcaaagctgtccagttacactctgaggatattaagacaactgaggaacatacaagttaccaatcacagtcagctatttcagaatatgacctgtgagctccatctgacttgctctgtggaggatgcagatgacaatgtctcattcagatgggaggccttgggaaacacactttcaagtcagccaaacctcactgtctcctgggaccccaggatttccagtgaacaggactacacctgcatagcagagaatgctgtcagtaatttatccttctctgtctctgcccagaagctttgcgaagatgttaaaattcaatatacagataccaaaatgattctgtttatggtttctgggatatgcatagtcttcggtttcatcatactgctgttacttgttttgaggaaaagaagagattccctatctttgtctactcagcgaacacagggccccgagtccgcaaggaacctagagtatgtttcagtgtctccaacgaacaacactgtgtatgcttcagtcactcattcaaacagggaaacagaaatctggacacctagagaaaatgatactatcacaatttactccacaattaatcattccaaagagagtaaacccactttttccagggcaactgcccttgacaatgtcgtgtaagttgctgaaaggcctcagaggaattcgggaatgacacgtcttctgatcccatgagacagaacaaagaacaggaagcttggttcctgttgttcctggcaacagaatttgaatatctaggataggatgatcacctccagtccttcggacttaaacctgcctacctgagtcaaacacctaaggataacatcatttccagcatgtggttcaaataatattttccaatccacttcaggccaaaacatgctaaagataacacaccagcacattgactctctctttgataactaagcaaatggaattatggttgacagagagtttatgatccagaagacaaccacttctctccttttagaaagcagcaggattgacttattgagaaataatgcagtgtgttggttacatgtgtagtctctggagttggatgggcccatcctgatacaagttgagcatcccttgtctgaaatgcttgggattagaaatgtttcagatttcaattttttttcagattttggaatatttgcattatatttagcggttgagtatccaaatccaaaaatccaaaattcaaaatgctccaataagcatttcccttgagtttcattgatgtcgatgcagtgctcaaaatctcagattttggagcattttggatattggatttttggatttgggatgctcaacttgtacaatgtttattagacacatctcctgggacatactgcctaaccttttggagccttagtctcccagactgaaaaaggaagaggatggtattacatcagctccattgtttgagccaagaatctaagtcatccctgactccagtgtctttgtcaccaggccctttggactctacctcagaaatatttcttggaccttccacttctcctccaactccttgaccaccatcctgtatccaaccatcaccacctctaacctgaatcctaccttaagatcagaacagttgtcctcacttttgttcttgtccctctccaacccactctccacaagatggccagagtaatgtttttaatataaattggatccttcagtttcctgcttaaaaccctgcaggtttcccaatgcactcagaaagaaatccagtttccatggccctggatggtctggcccacctccagcctcagctagcattacccttctgacactctctatgtagcctccctgatcttctttcagctcctctattaaaggaaaagttctttatgttaattatttacatcttcctgcaggcccttcctctgcctgctggggtcctcctattctttaggtttaattttaaatatgtcacctcctaagagaaaccttcccagaccactctttctaaaatgaatcttctaggctgggcatggtggctcacacctgtaatcccagtactttgggaggccaaggggggagatcacttgaggtcaggagttcaagaccagcctggccaacttggtgaaaccccgtctttactaaaaatacaaaaaaattagccaggcgtggtggtgcacccctaaaatcccagctacttgagagactgaggcaggagaatcgcttgaacccaggaggtggaggttccagtgagccaaaatcatgccaatgtattccagtctgggtgacagagtgagactctgtctcaaaaaataaataaataaaataaaatgaaatagatcttat

SEQ ID NO: 751 - protein, 329 aa, Homo sapiens
MLWLFQSLLFVFCFGPGNVVSQSSLTPLMVNGILGESVTLPLEFPAGEKVNFITWLFNETSLAFIVFTKSPEIHVTNPKQGKRLNFTQSYSLQLSNLKMEDTGSYRAQISTKTSAKLSSYTLRILRQLRNIQVTNHSQLFQNMTCELHLTCSVEDADDNVSFRWEALGNTLSSQPNLTVSWDPRISSEQDYTCIAENAVSNLSFSVSAQKLCEDVKIQYTDTKMILFMVSGICIVFGFIILLLLVLRKRRDSLSLSTQRTQGPESARNLEYVSVSPTNNTVYASVTHSNRETEIWTPRENDTITIYSTINHSKESKPTFSRATALDNVV

SEQ ID NO: 752 - DNA, 2737 bp, Homo sapiens
acagaagggcaaaaacattgactgcctcaaggtctcaagcaccagtcttcaccgcggaaagcatgttgtggctgttccaatcgctcctgtttgtcttctgctttggcccagggaatgtagtttcacaaagcagcttaaccccattgatggtgaacgggattctgggggagtcagtaactcttcccctggagtttcctgcaggagagaaggtcaacttcatcacttggcttttcaatgaaacatctcttgccttcatagtaccccatgaaaccaaaagtccagaaatccacgtgactaatccgaaacagggaaagcgactgaacttcacccagtcctactccctgcaactcagcaacctgaagatggaagacacaggctcttacagagcccagatatccacaaagacctctgcaaagctgtccagttacactctgaggatattaagacaactgaggaacatacaagttaccaatcacagtcagctatttcagaatatgacctgtgagctccatctgacttgctctgtggaggatgcagatgacaatgtctcattcagatgggaggccttgggaaacacactttcaagtcagccaaacctcactgtctcctgggaccccaggatttccagtgaacaggactacacctgcatagcagagaatgctgtcagtaatttatccttctctgtctctgcccagaagctttgcgaagatgttaaaattcaatatacagataccaaaatgattctgtttatggtttctgggatatgcatagtcttcggtttcatcatactgctgttacttgttttgaggaaaagaagaattccctatctttgtctactcagcgaacacagggccccgcagagtccgcaaggaacctagagtatgtttcagtgtctccaacgaacaacactgtgtatgcttcagtcactcattcaaacagggaaacagaaatctggacacctagagaaaatgatactatcacaatttactccacaattaatcattccaaagagagtaaacccactttttccagggcaactgcccttgacaatgtcgtgtaagttgctgaaaggcctcagaggaattcgggaatgacacgtcttctgatcccatgagacagaacaaagaacaggaagcttggttcctgttgttcctggcaacagaatttgaatatctaggataggatgatcacctccagtccttcggacttaaacctgcctacctgagtcaaacacctaaggataacatcatttccagcatgtggttcaaataatattttccaatccacttcaggccaaaacatgctaaagataacacaccagcacattgactctctctttgataactaagcaaatggaattatggttgacagagagtttatgatccagaagacaaccacttctctccttttagaaagcagcaggattgacttattgagaaataatgcagtgtgttggttacatgtgtagtctctggagttggatgggcccatcctgatacaagttgagcatcccttgtctgaaatgcttgggattagaaatgtttcagatttcaattttttttcagattttggaatatttgcattatatttagcggttgagtatccaaatccaaaaatccaaaattcaaaatgctccaataagcatttcccttgagtttcattgatgtcgatgcagtgctcaaaatctcagattttggagcattttggatattggatttttggatttgggatgctcaacttgtacaatgtttattagacacatctcctgggacatactgcctaaccttttggagccttagtctcccagactgaaaaaggaagaggatggtattacatcagctccattgtttgagccaagaatctaagtcatccctgactccagtgtctttgtcaccaggccctttggactctacctcagaaatatttcttggaccttccacttctcctccaactccttgaccaccatcctgtatccaaccatcaccacctctaacctgaatcctaccttaagatcagaacagttgtcctcacttttgttcttgtccctctccaacccactctccacaagatggccagagtaatgtttttaatataaattggatccttcagtttcctgcttaaaaccctgcaggtttcccaatgcactcagaaagaaatccagtttccatggccctggatggtctggcccacctccagcctcagctagcattacccttctgacactctctatgtagcctccctgatcttctttcagctcctctattaaaggaaaagttctttatgttaattatttacatcttcctgcaggcccttcctctgcctgctggggtcctcctattctttaggtttaattttaaatatgtcacctcctaagagaaaccttcccagaccactctttctaaaatgaatcttctaggctgggcatggtggctcacacctgtaatcccagtactttgggaggccaaggggggagatcacttgaggtcaggagttcaagaccagcctggccaacttggtgaaaccccgtctttactaaaaatacaaaaaaattagccaggcgtggtggtgcacccctaaaatcccagctacttgagagactgaggcaggagaatcgcttgaacccaggaggtggaggttccagtgagccaaaatcatgccaatgtattccagtctgggtgacagagtgagactctgtctcaaaaaataaataaataaaataaaatgaaatagatcttat

SEQ ID NO: 753 - protein, 269 aa, Homo sapiens
MLWLFQSLLFVFCFGPGNVVSQSSLTPLMVNGILGESVTLPLEFPAGEKVNFITWLFNETSLAFIVFTKSPEIHVTNPKQGKRLNFTQSYSLQLSNLKMEDTGSYRAQISTKTSAKLSSYTLRILRQLRNIQVTNHSQLFQNMTCELHLTCSVEDADDNVSFRWEALGNTLSSQPNLTVSWDPRISSEQDYTCIAENAVSNLSFSVSAQKLCEDVKIQYTDTKMILFMVSGICIVFGFIILLLLVLRKRRIPYLCLLSEHRAPQSPQGT

SEQ ID NO: 754 - DNA, 1022 bp, Homo sapiens
acagaagggcaaaaacattgactgcctcaaggtctcaagcaccagtcttcaccgcggaaagcatgttgtggctgttccaatcgctcctgtttgtcttctgctttggcccagggaatgtagtttcacaaagcagcttaaccccattgatggtgaacgggattctgggggagtcagtaactcttcccctggagtttcctgcaggagagaaggtcaacttcatcacttggcttttcaatgaaacatctcttgccttcatagtaccccatgaaaccaaaagtccagaaatccacgtgactaatccgaaacagggaaagcgactgaacttcacccagtcctactccctgcaactcagcaacctgaagatggaagacacaggctcttacagagcccagatatccacaaagacctctgcaaagctgtccagttacactctgaggatattaagacaactgaggaacatacaagttaccaatcacagtcagctatttcagaatatgacctgtgagctccatctgacttgctctgtggaggatgcagatgacaatgtctcattcagatgggaggccttgggaaacacactttcaagtcagccaaacctcactgtctcctgggaccccaggatttccagtgaacaggactacacctgcatagcagagaatgctgtcagtaatttatccttctctgtctctgcccagaagctttgcgaagatgttaaaattcaatatacagataccaaaatgattctgtttatggtttctgggatatgcatagtcttcggtttcatcatactgctgttacttgttttgaggaaaagaagaggcagattccctatctttgtctactcagcgaacacagggccccgcagagtccgcaaggaacctagagtatgtttcagtgtctccaacgaacaacactgtgtatgcttcagtcactcattcaaacagggtgagtcttttcagctttatatgccattgttgtcagttttacagccattgttcacaaacttgtcaccataaccatct

SEQ ID NO: 755 - protein, 315 aa, Homo sapiens
MLWLFQSLLFVFCFGPGNVVSQSSLTPLMVNGILGESVTLPLEFPAGEKVNFITWLFNETSLAFIVFTKSPEIHVTNPKQGKRLNFTQSYSLQLSNLKMEDTGSYRAQISTKTSAKLSSYTLRILRQLRNIQVTNHSQLFQNMTCELHLTCSVEDADDNVSFRWEALGNTLSSQPNLTVSWDPRISSEQDYTCIAENAVSNLSFSVSAQKLCEDVKIQYTDTKMILFMVSGICIVFGFIILLLLVLRKRRGRFPIFVYSANTGPRRVRKEPRVCFSVSNEQHCVCFSHSFKQGESFQLYMPLLSVLQPLFTNLSP

SEQ ID NO: 756 - DNA, 254868 bp, Mus musculus
  misc_feature (1)...(254868): n = A,T,C or G
gtatagtagcctgggctggcatttgtgttctcttagtgtctgtataacatctgtccaggctcttctggctttcatagtctctggtgaaaagtctggtgtaattctgataggccttcctttatatgttacttgacctttctcccttactgcttttaatattctatctttatttagtgcatttgttgttctgattattatgtgtcgggaggaatttcttttctggtccagtctatttggagttctgtaggcttcttgtatgatcatgggcatctctttttttatgtttggcaagttttcttctattattttgttgaagatattagctggccctttaagttgaaaatcttcattctcatcaattcctattatccgtaggtttggtcttctcattgtgtcctggattacctggatgttttgagttaggatccttttgcattttgtattttctttgactgttgtgtcgatgttctctatggaatcttctgcacctgagattctctcttccatatcttgtattctgttgctgatgctcgcatctatggttccagatctctttcctagggtttctatctccagcgttgcctcgctttgggttttctttattgtgtctacttccccttttagttctagtatggttttgttcatttccatcacctgtttggatgtgttttcctgtttttctttaatgatttctacctgtttggctgtgttttcctgcttttctttaagggcctgtaactctttagcagtgctctcctgtaattctttaagtgacttatgaaagtccttcttgatgtcctctatcatcatcatgagaaatgtttttaaatctgggtctagattttcggttgtgttggggtgcccaggactaggtggggtgggagtgctgcgttctgatgatggtgagtggtcttgatttctgttagtaggattcttacatttgcctttcgccatctggtaatctctgaagctagctgttttagttgtcactgttaagagcttgttcttcaggtgactctgttagcctctataagcagacctggagggtagcactctccttagtttcagtgggcagagtattctctgcaggcaagctctcttcttgcagggcaggtacccagatatctggtgttcgaaccagactcctggcagaagttgtgttccactcactagaggtcttaggatctcatgtggaatcctgtgtgggcccttgcgggtgtcaggcgactcagctggcaaggtagcccggggctcgagtggagcggaagggggtttgtgccccagatcaagcccgggtagcctgcttccctatgtacctatgtaccgcagtctcaggttccgcgggattggattggggcaggcgctgtgttccactcaccagaggtcttaggatcccgtggggagtccccgtgtgggcccttgcgggtgttgggcaagactctgctggcaaggtagcccgggggtcgagtctcaagtcgagtggaagggacttgtccttgctgaacttttaatgggttttaaagttgtggtgtgtgtgtgtgtgtgtgtgtgtgtgtgtgtgtgtgtgtgtgtgtgtgcgtgtgtgcatatgagagttcatgggatgcatgtgggcatatgtggtgccatggcacatgtgcagaggtcaggggacaactttatggagttgattctctccttccactttcacacaggttccgaagattgaaggcaggtcactatgcttgtacagcaagctcctttacccgctgagccatcttgctggcccccaaggcagattatttataacaatggctctcaaccttcctaacactgagaccctttaatatacaaactcatgttgtggtgaccctcaaccataaaattactttcattgctaccttataactgcagttttgctactgttatgaattgtaatgtaaatatctgatatgcaggatgcctgatatccagccccaaaagggaaccactggtttataacaaattagtgccttactgaggatctgttgggtgtgtcttatatctcagatacttttgtgctcacagaagtaaggatgcttaactgagacccggaatcttggccacttgagaggtaaagacaggaagcttatggactatgagagttctacaatgccagaatgggcgacttagtgagattttgtctcaaaatggaaagggcaaagaggattgagaatgtagctcagtggtagagcgcttgacttgaatcttggctagagggactgggagtgtagctcaactgcagagcccttgcctagaatgcactgtgccttagttcaagtcccccattaccacaaagagaaaagaaagaagagagaaatcaagtctgttccctttgtaaagcttactttaactctgtatacacaaccctagagataaacacaaagagaaggaaaggctatattttaaagttacaaatggggtgtatttggggtgaggggtgtaggcatgctcacatgccctatttcatggcctactgggagccaagcctagctcttccctattgcattatgggaaaggaagccaccttcccctttacgtcacctcttgctctttcgggttgttctccttgtcctccatagttgtccaccattgagactaatgacattcacaccctgtcccatggtcatgggtgcatctttttagtctgactactgatgattaattgtgtaattattagtgaaaattgagagatatatacacagtattcatgctgcttttgctaagcaaagatgacctgcttcatgactgcatagtatttagcgctcgagcttctattttatacagatgtttggttttcctgaaggtttgagttgtcttgcttttcaaaagggagtgtgcaaatatgtgtatatattagctatatatgaaatttaagtttgtatatgtgtgtatgtgtttgtgtatgtgttttgctatacttaaatacagtaaataaataacacagagaggggacggggggagggatagggagagggaattcatcacgcactcctgacaaccagggcataaacttcatgtgaggaacaagccacatgtaaatttcgagagaactaaagaactgtctgagaggatgtgtgatgtgtgaaatgatgtgagctcaaggctcatcagccccacagaacattaattatttaacgtgtaaagttgctgaatcaagactaacaacgcatgtataacattaaatccctaaaaaggtttagaagagattgcccttgatcagggaagggagagttgttccatcttagtttcagtatgctaaacgtgtgtatatatactttaattaaaagtctaaagtagagctggtacgtagctcagttggttgagtgcttgcctggcattcctgaagccctgggttttgctcccagtaccacctagaaccagacatggtagtatatgcctataatcccagcactggagataagaaggttggcctcatctgttctagttagctttctgttgctgataagcactgtaacacaaagtgatgtaggaaagaaagggtttcattggctaatatgtcacaatcatagcccatctctgagggaagtcaagccaagaactggagcaggggccatggaggaggctgctcactggcatgctcctaggatcactgtcagctactttttctcatacatttcaggtctgcctgcctagggatggcaccacctgcagtgggctggccttcctataccaactagaagtcaagaaaaagcacccccccccaggacatatcccagggccaatctgatggaggcaataactttattgaggttccttcttccaagatgatagtacatcatctcagagttcaaaaccaacctggggtatatgagagaccgtctcaaaaaatgaaataaaataaaataaacagcaagcatcctttcacaggaagaaagcgtgtcagagcaacgtgctatcatgagcactctccttgctgtcggggtctctggatttcaattatttatgcacaattatattgcattgttttacatttgcaataatgaccgtgtgggctttgcaatcagcatttccccaagccttgctttgaccttgctgtggatgcttgcacgggccaagctaacctttctggtcgctttctccatcttttctcactggtgtcctgtgtgagcatagctccatctgaaagaatgcaggagttggggatggggagctggcatagagaacagcctcacatatgatgaccttgaatggggcaaatcccaccaatgactctttgcctctgttgggagacagcaggtttatttgtgcttaaagtaagatgcccagtgaacagtctgcatccctgtgaacccaggacagaaggggcttctgtcacacctgtcacatggtagcagatatttctcctggtgggaatggaaacttcccaatgcctataccttcctcctgccaagggtctaatgacaaattaaagctcacactgagagctcacatacagaagatgggagaggggcagctgtgctggaaggtgtgtgccctatatggatgaaggcttccctgaggctgcagatggaactcccttctcctagtcttccccaacctgtatactctagctccccacatacatcccaattctaagattgtacacaattaggacagaataacatacaacaggctgaggggagtgactggattctcttccccacctctagggggaatggaacagccaacaagcccagctggggtttgcaagcaggtacggctagtctcatgaaagatgcctagctctgctcagtcagtgacagtgctgcacagtgctgcctaaagtatagtctgcttagcctaagcaagagaggctccatctgagaccatcttccccaggtgataaccaccggtgtgggcatcttctcatcttctctgctgtctcggctgtgcggtgattaatgacatgtgagcacgtggttcagtgacctcttggctcccactgctgctctccttcactcctcataaccatttgcaaatattagctccctgtgtcgtttctcctcatcagccgctttcacaggtgacaagccgggtgctcctcagattgccatatagcatacgctccggtcctcgtgacagtctgacatctggtgagccatccccgaagtttctaagggaaggcatcagcaggaaggttcccaggggagtcctaaagagaggggacttcaggggcctatggtctgggaaaggccagggctgctgcatgtgtcccaggaacctaagggtgtatgaaaatagacctcccatcattaaatcaatgtatatgtttaagagtatgtatttgctggcccttttgtatatgtgtgtgttatgagctaatatgtttgtgcacatgtgcaggggtggaggtattcatatgtgagtctgtgaatgcggaaattaaagtcaaatattgttcttaatcatcctccatctgagtcttgagatagggtttctcattgagccagagctcacagtttgggcagacaagctggctagcacaccccagatagaagaggctacctctacctccccaatgctggaattgtaggggttcacccagctttttacatggatgctggggacccaaactcgggtcctcatgctttaatatcaaccactttatttgctgagctaacaacccagccccttattactgattggttgattaattgatttttgttttggactatgtagactagactggccttgaatttgagatcctctttcagcacctcccgtgctccatttgtgtgagtgtgtgtgtgtgtgtgtgtgtgtgtgtgtgtgtgtgtatgctagcacagatgtgtgaaagtgcatatgtgtgtacatgcatgtagaatccagaggacaactttggagtatcattttcctctcttttaaagagagacagggtctcctcttgcccttgaacctcccaggtaggccaggctgactgtcttaccgaagagtcccaggttccttttttttttttttttttttttttttttcgagacagggtttctctgtatagccctggctggcctggaactcattttgtagaccaggctggcctcgaactcagaaatccgcctgcctttgcctcccaagtgctgggattaaaggagtgtgccaccacgcccggctcgagccccaggttctaatcccaagaggtcctctttgggattagaagcatgcaccaccacacctagcttttctacataggtctggggatcaaactcagatcctgaggttccaggacaagcactttacagactcagccaactcctcgcttcctctttccacactgctttgtcatttatatgcacctctagtataaaaccagttcctctgtaagcaaggaacaccagatacagcactctagatggtgagtctaccacaaatgagccagaattctgaatagccataactgcccacatgctaattgttcactgtgagggaccaaagagggtattttgctctttggtcatttaaatttgtttttattcccggtctcttacatccacaccctgtgttgaagtccctactctataaatgcttttgatttcccctaaaaaattagtaaagttgctgtgggtggtttattttgatgctaactgtactttagggggaaagcagcaaaaattgcatatagctttctccttcttgtctctataagtgtgagctcaaattatttatagtttgatactcagagatggtttccgggtatttatgtagcagaaaagcaaaggggctgggggtgactgtggagagaagagaacacttggatgactgaacgaattcaccctgggtgtcaccaggactgatctgtgaccctgtgcctatcagagttcccaacccatggcatatttgtccagctgacctgattagaaaatagtggacatattagttagttttctggccatgacaaaattctgacaaaggggacttacagaagcaagcgttgactctggctcatggtttgagggtgaaagtccagcatgcttggggaagcaggagcgtgcagcatgcacagacaggaagcagactgagtgtgagtgctatctcaccctctgctttgtattcagccctggatcccagccatacatggtgccatctatgttcagggtgggtcttcccacttcgcttagactactttagtaaaccctctcacagacaggcctagtggtttgtttccatggtaattataaatctcatcaggttgacaattaagattaactgccacagtgggtatgccaggtgatgtcaataaacaaacgcttagatcaatggaaaaaaaataactggaagcattttagaaaatgccaagcccctgaaagcttgccgctgcccaagtgcccagtggtgacaggtggccggcagacaaggctggctgtgcctagactccatcacctgcagtctgatggaggccaggggcaatgtaaaaatatcccatgctgtgctcccttgaggggtcctggtaagtcatatgttctgagtttcctcttgctgtagttttacatggctcttttctctgtccttcccccatcaccccatcttccattctgaggagtgttccatggatgttttgttttctctgtcacaggagatactggtacccacgaggccatggccccaatcatcgtggttgccccaggcaacagaagtgtggtagcagggtccagtgagaccaccttggagtgcatagccaatgccaggtacagggtgtgctctgggcgtggggacttaggtggggcatctgtcatctgaaaacccagaccctgaaatacttccaaatctgggacttggcgccttgatgccaagctgcagtggaaatttccaacccgatctcatatctctgatgggtcaaagcacagatgcactaagaatgaatatagcatgggattccctttgggctaagtgtgtaaactgcagatgaaacacaaatggatttcatgttcagacttggctcccatccttatgcagtctcactgagaatatacaaatactccagagggggaaaacccaaaatacaaagtacttataaaggctgggcatttcaaataaaggcaacagaacatggacaagaggccggggagatggcttggccagtaaaagacttgatgcacaagcatgaggacccacgttctgctccccagaatccacataaaagccagatgtgttatcgtatactcctgtaatcctagcgttggagagacagatacaggaggatccctcgggatctgcggttcagctagcctagcaatacaccaagctgcaggttagtgagagaccctctctcaaaaaaattaaggtagcaagaggtataaataataaccacattgacctacctctagcctctctgggtatatacacacatgtacactcatacactccgataaataagagagaacctggacttggatatcctcctgtggaaagacagtgatgtggagaacagcgtatgagctccacacttcagactgcagcaggctcgcttctcctggggcactacatgtcacgtgtcagggaatgcaggggacctcatgctagatacttcctcccactgtctctgcagtgcatggagcttttcaggttagctcctggtgatggagagacctcctcagcaacaatgactcaagctatagagagagagatgagccaaacccctgttcagccaaggaaagctagttcctcttgcccttctagttccaggcatgccctgcctacttcctggtcactctaggttgaggttttagatggtcacaccttccatgtatctgtaggtcccctagtagtatttatttgaagcattcttttcctgggcaaatggaatcattagcatgtatggtccattgccgctgcaattagctatccttgctcaatagcccttgagcagaatgtctcgttgaggcgagctgtgagggagtggagcaggatctggattgatttttaaatgtccattgttcaacccgccatggttcctggtagaattagctttgtcaagctcgtgctgaatgcctgaaattattattactgccgtccacgtgattcgccgctcgctgtcaccggtgcccttccgctctttcgcaggcccgtggaggagctgagtgtgcactggaagagaaacggagttcgactcacaagtggactacacagctacgggaggcgccttaccatcaccaatccgacatcagcagacaccgggatgtacgtgtgcgaggcgacactccgggggagcacatttgagccagccagggccagagccttcctttccatcataggtaatgctcagtccagcagtggtgctggctgcatcctcaggtagctctccattcccacagtgccaggcagacaagagagctgctgtgtatcccactgacctgatgtatttgtgcacgtgtgccgcctctgcacacagatgtggaagccagaggttgacatcaggtgactctcctctgctaccctccaacttgttgtttgaggtagggtctctctctagaacccgagagctttccattttggctagactgactggctccatagctggctctcaggatccagctgcctccctccaaccacagccctggggttatagatgatccactgctgaccctggctttttatgtgggagcagcgggtcctcaagctgttgcagtgagtgtgctgctaagtcatctcctcagtccccactgacctttatttttaatgacagtgattgatgattgattgattgattgattgtatgtgtatgtttggagaggggatgctcacaggccacaggatgcatgtggaggtcagaggacaacttgtgagagtgagttctctccttccatgtatcctggggatcaaactcaggtggtcagacttgtctgagcacactttccagcttagccatctccctgggccacaccgaccttatctttaatgatgtaaatggtggtatggtagagtttatcttccgagttaatcccatttgctttagaccaaagtaggaatgtctctagtaccttctcaacatagccttgcctctcgcctttctcgtcactaggacagagcacctgctagaaactcttcaagacaggacaggctttcgtttacaattgcaaggcatacagtcctccgtggtagggaaagcacagtggatagtttggctttgtttgtggtagtgagaccctgcagcccctaaaattgtgtccaaaatccctgctagattatgacccttgaaggtctatcccctgtaaccaccaaaagttctgacgtgtcccaaaacagcaccaccgcctggggagcaaacattgagaacgggagcacggggggggggggggacggacagttcaccctcagtccacaatcacctgctgccataaagcttgacagtggaggtgggggctgtcctcatcacagccactgcctgcctcttctggcctctcttttgccccaaacttcttcctaactctccctggctctcaccatctgtactcagaagtcagcctatgtgatgtcgactgggaaggttgaactgaagtgtaagaacagcaatcattttttaaaaaaacaggccaagtatgacccgaaggtggggagggcagataaagttaaatgttccgagtcaccactaaatactgtaagatcacaggcttggaagcatggcttgggctgcggccgagggaattgtaagcttaccacaagatgatgatatgggcgcatcacacagcgaggcaagtacccgcgcttgattttcccagcttcctgcatggtcacgagcttgttcttaaaatggctgcagctgctgtcctgctgccctgcgagtcctcagcagaagccactgctgacagagagtgcctcaaaggcagcttcactccatctcttgtcagaaatgaaaggcattgaaatggacgggggaaaggcctctccagagaattactccttcaataacactttttttttttttgcagtttgccattttgcaaaaagaaaaatgcagatagatttctatgaaattagccagcaccgagcagcattgcatagaaggtggttgccctgagcagtctcttgtctgttagccatcaggacaggggtttgcgctctccctgtgactttgctacatacagcccaccagcaacctccagagcaggtcatgagggtgatcagagaatcagagccacggggcagagtcgccaatcactgctgatcccacccgagggtctgagctctggctgccagtgctagatatagatgtgaaaatcatatcccattctcagcagagacttccattgggcttgatctatgactgtctgagcacagtccattatagattgaaccaaaattaaaatttgttatgtgtaaatctctggaagacaggactctattgtgttaaaaaacatttttaaggtaatttaaacaagggaggaaatttatctccctataaactgggaatgtttgcctctatcaccattccttcctcgagtatttaaatctatcatcctaactttgatctcaaattcacatcagaatcggtttttgcatttagcccttaccatccctcatgttctggcttggaaaggtacgggaacacactccagttcttttgtctgtagatgaatgtatgtgtgtgcacatgttcgtgtatgttcagacattgaatgccttcctcagtcactcttaaccttattttggggatttaaaaaatgtgtgtgtgtgtgtgtgtgtgtgtgtgtgtgtgtgtgtgtatacagcagcctgtgtagacccaaagagagtgttggttcccccagagctgaagtcgaaggcagataccagcctcctgatgtgggtgcttggagctgaacttgggtcctttgctagaacagtaaattctcttaactgctgagccacctcccttagtttttgagacagggtctctcactgaacctgtgattgccattttgtctagtctgactgccgagcctcagggatcctcctgttcctacctgcagcatccctctgtggtagagtcacagggacacactgtcatgagtgctgagggcacacactcaggtctccatacttgtgcagtgagtacctcaccactgagccacctcttgtccccagcactttctgtctgaataagtttggcttcagtccccttttgtttagaagttgttgtgacagatgaaattttgtggttgggtcacactggagaaaacactgaagaaagcatttctgttgattcaaaggactcagggattgtcaccaagctcggccaccacatcagggagggattccgagcaatcgtgaccaatctaccaggctgtcaccagcagagctgggcagagagctattgatatgagcatgcagatgaatggaagcgaaaggaatagccttccaattatggatatttcacactgatgagacgagacagacggcagcggctgtttgccctgcctgtcagcttccagccgaattgctcaatttctgtagtctaaacaggactccaagctctgatcactagaaggtgcctggcatccacactgtagagccctgaggtctgtcccctgaccccctcactgctcagttgtcctgctgtccctctttcctcctgacctctgctgtgacatctccctgctggccagactctgggccattgctctgacactcagaggctagtgtgtaacatgaccgctgcctccctatggtgtacaactttctgctctgctaccaccttctctttcttggtggcatctttcaggcataggaaccaactttacccaccatggggggggggggagtgctggtgctgccccccccaggagaagctccacccctgcatctgctgatagactgtgagctttgctactactaaccatgcagttctatgctggagattgtccatagtctgcaatgggccttgcctcttcttgctctctaaacagttcagccatctcccaagcactgcctctgcctctgcagccagtgtctggggccagctttgttggaggcaaaccctggatggtggcctcaggctgtgagcagctgtctgtgactgacctatccatcctttagcttctgacaagcttgcctgtcagtgagactaggtgtcccttgagaatctcctggaagtcactgtgcaagagtctcagctctgctctgtagcagttggcacatggtagcaaggtatgtggcagggagatataagcataggttttagggttcatgtctgactgtatgggtacctggtcgctgagctttaatgagtgtctttgatattcttggccttggttctgatccctgacatggagaggtggtaggtaaggctactgtctgaaacaagggagagtcaacaaagcaagctcaccataaaagtgctgaaagaatggcttcacgtgtcattagcatgaccaccatagcacgtgttgctggctagtgagtgtctatgtcatattaatgagtgtatgtgtaacatcagtgagtgtatccatcacactctttttacactaagagccatgatgctctcgccatccttggaacattggtaatttggtcaggataaaacaaaggatggcaactgtgatggctggctttaactgtccatgtgacacactctagtgtcacctgggaggagtctcagtgaggaactggctggttcaggttgacctgtggacatgcctgtcagggattgtcttaattaagttaatggatataggaagacccatcctaaagccagcagcaccatccttgactccagaccctggaccgtggagaaagcaagctaagtaccaagtatgcatatggttgttgtctctggccttggctgcagctatgaccaactagctgctttaagtccaggagtatgaggcagcgggtcatactgcatcctcagtcagggagcagaaagagatgaactcttgtgctcagctcactttgtgctttaaattgactccagccaccggttcctctctgctgtggtggaccacaacctggaggtgtaggctaaaataaaccctgtctcccctaagttgcttttcatcagggtgttttatcacagcgacagaaataaaactaggccagtggctcttaccaactatagcatcttggaccactggtgtgtgtgggggaaaccattagacaccttttcctcccaactgacagattcagcatgtcccacagaagccatagctgctctgggcccacccctgccagtgtgcacagagttccttcacacccaccctagtcctaggagcagagagtggctatgttggtttttctcattgttgtaacaaaactaactgagcaaagtaacttagggaggagtggttatttcctctgctcacacttggaaggcccatcctggtggggaaagcccgacaacaggagtatgaggcagcgggtcatactgcatcctcagtcagggagcagaaagagatgaactcttgtgctcagctcactttgtgctttaaattgagcccagcacacagcccacagcactcagactggtgctgcccacactgggggagggcaatcttttctcctcagttatacctttctggaagcatcctcaaagacactcccagaggtgaggtgtctccatggtgttaataaatccaacaagcacacaaggaagactgagcaacacaacaaccaatactccatctctttcttgcaaagctattctgagtccctgaatgcagatcactcctattttaaaacaaagccactcatagtggctggtacagtgtcacagatgagcagccattctgcagcctagtaggtgtttatgtctctctctccctcctcccctccctctcccctcaattcctcttcctgtccctcctatccatccttcctttccccacccctctgtctttccccctcctctctctcttccttcctttcttctttcccttctccccaccattttccttttttctcttcccttcctccagtccttccatcttcacatctctgccccgcctcttgcctctcctgcttccttgtagagaaagttctccactgtctgggctcctgccatgagacctggccactcagctaaccccgctctcccactctctccattttaagatccatgtcctttatcccacttgcagagctcaccgtgtcccatacagagcacacaggtcccaggggatctggtgtagacatcctcagggaccattctgcccactccagtggacgaggcacccagtatggacagctactgcagccaaaggcacagcatagcagcagaactgggcctctagagggcagggaagctgatgtaggcaatgtgcttatcagaacaggcctggggatcagtctggattcaccaccaagcctgagggctgtacaacatggcctgggtatgcattaaccacccccactgaggcagtccttcaagcacctctgcttctagccccttctgtcaatgccccagttttgaactacttggaggggtcctagctctggttctggtactgcagctgggccatctggaggacattcagcccatgctggctttaagctctgatttcacccagggcaagagactcttctgatgtcttcatcttgattctaaagatggaaatgcccgtttctatcctgggttttattggctgcagctgtgatcgatatttaacagtccagtacaagcctgtgccaactgggctggctctcgctctctctctctctctctctctctcgctctctctctctctctctctctctctctgagtctctcatttgccaagacagacagattcacccagttgcccttggaagatcaagtggtaaaaaaggcatgtgacttagatgactgtcctcagggtgtctctgtggctcagctgcaagtccccacagctgaagacctagtaagcgccccactatcctcatcctgtagacaatgtggaaacaagcaagacccttgaaagctcccattgaattgggttgatgtgagggacccacaaagagagattgtggcttatgggtggcagggaagaagtgccatgaagcaggcagtgtcactgtggcagctctaacttctagcctgtcagctcacctacctgtcagccttccaggaacaagctgtaacaggtgtctccgaagggttacaaagtttcctggtgcctctaggccacccttccgcacatcagtgagagaggtgctgtaaagtagggaggtggcatatctgcctgactgtgtgctgtgcaccacacctgcctggccaaggcttgtggtgagtgacatcccctcatgcatgtccatccccaagaacatggtgtggactcactgtctccatccccagtcatgtgccattgtgcactcctcagaagccaagaatataaatagcacctgggcttcttagtaaattttttattgccatgataagacaccacaagcaagacaacttattttttaaaaaagaaaagaaatttattggagggctcataatttcagaggatgagtcagtgaccatcagggcagggaatgcggtagcagggagccacagcactggaggagtacctcaagcttacttacatccccatccagaaacacaaggcagagagagccaattggaggtgggggggcttttgaaacctcaaagcctaccctcaggaacccaccacctctaacaaggccacacctcttaatccttcccaaacagttccatcaagtggagaccaagcattcaaatatatgagctcatgggggtggagcatttctattcaaaccaccacaccatggccctggaggtgctgggagtcctcaggatgggtatatgctcttaagtgtgcctcctattggacacatttcaagggaatcacacagaatgaggacagccacttccaagtgacatacagcaatactggttccataacattcttgacatgaaaaactaatgaaagtggggattggtcctggggctaggcacccgggctagggtagatggcatcttcacgatgaaggaccattctgtgttccaatacagtatagacacatgaccctacatggtgactgtggtgcatggaacgaagcacaggtatgtgcacacacaagcagaagcatgaaggagcagttaggatcaactctgttgaccatgtggctgacaccctgtaggtggctcagtataggatggcattaccagtagggtgattattgtagacccagacccaagaagacacaaaccagatctataccccaaggcaacactacaataaagtctagctcaatgagccagtgagtttccaggttacttgtagagctgtgtgaggggtcacttacagaagcatggttaacctcaaagtagccacctcactaatagcatgctattgtagatggcaactcctcagtgggccacacaaatggagtccccacttccattaactttccacctggtctggactctggcacctcccagaaccaggcaaccatgtttagtcaggagagatttatattcattgatccagaaggtgcaggatggtgtggctgaaatctcagataagggtctaaggaccttacatgcctcctccttctatgaaggaatgtcaacctgcatgtgagggtctctgggggaagtcacaagggctttgatgaaggtaacagttatagccattttcccaagaggacagagttccacagggtaaaccgaggaaaagatatatgggctcctcctgtattatgacttgcaagtgcctgagtctgcagttatctgaaaatagaatgtttgacagaggaaatggaaactgtaattaatcacaagcaaatgttgatatttaacttaatttttccccttttgccctcacatccctttaatcagaacatgatggtagctattgaatttagcatccactgatgaatacgggccatgacctgttcgtaaggtccttgacaggctgcaccgctgtggagttggaacataaatagtactgctagcgttactattgattagagagacacgtctgagcagggaatatctgtgtgcaaagaccagctaagaaagggaagacttcacatctttacagctcgtctcctggccagtctctacacacaaaactcatatcagagggttctgcttctgcctagtgaacccactgccacctccacagggcacatggggagttggggcagggctcctgctcaagaggcccaggtaattgcagagttggtacccactttctgtccattcagaaaccttcagtcttttcttcttggagctcatgttttcatctctgttcccctctttaggtcccaccctggtttgtgggtttttttttcttcttcttaaaatgtagtcaatatagaagacacaccaagccttattatccacatttaacactattacaatgaaaagaagatgtctccagaaattaattatcacgcagaaagtgaacaccagagcctttgtcgtcgtgataatgaagtatcactgaagccttaatgctcctgagcccggccatgcctctgctggactctgctgaagaaacgggggaatgctgcaatttactctccaaggaaactcattgtctaatgctgccaccatttcctcttctgcaagcaagggggaggctagagaaaaatgcctgggagtttccctccctgccaaggatggatgagagtctctgcccgtcctcctccacctccccccactattattttgcattccatcgaagtattaaatttacattttggaggagaactgctaagacttaaaaaaaaaaaaaaagttaataggctgcgctgttccgtgatatagacctggccccttgttatagggctattcagcatgcctcacgggtggtgtttagtttagatatggaaacaaactagcctctaaagtactgtgctgtaaatatacctttatgaagctcttgggatgccctttctaaaatgtgaattaagatattccatgatttcaagcccataaactgagaagtagccatcgccctgagtggtaatttgctttctgaaaccttagaatataaatcacccttgcctgctgctccccaactttgagtctgtgagcgtgatggtgactaacgatgatgtagttagaacaatcctgagagcacagactgaggactggggaggcggctccgtcaataaaggacttgctacacgtacatgaggacctgtgctcaggcccccagcactcagagaagaagccagctacggcagtgcacatcggtactcttggtgctagggtagaggagagtgagacaggaggattccagtctagccaaattgctgagcttcagatcccatgatagatgatgtctcaaaaaataaaatgaagaacatttgaagaagacactcgacattgacctctggctgatacacacacacacacacagacagacacacggacacacacatatatacatacagacacacacacacacatacagatatacatacagacacacacagagagacacatacacagacacacacacagagacatacacagacacacagatacatagacacagacacacagacacatacatacacagacacacacacacattgcacacacactcaccacactgggagagagcaaaagaaagctaaagcaaaagagagagggagagacagagggagagggaggggagggggagagagaggtacaggagggagaggtgcaggagggagagatggggagggagagatgagggaggggaagggagaggtgggggnnnnnnnnnnnnnnnnnnnnggtgcataatgatccttgacatccttcctgtgttagttacgttctcactgctgctaaagggagaaaggggttgtgttgcccatagttcccgcgggagcaggcggggaagccccagtggcaggagcagaaggctgggtgttctgcattgcatccattctttagaggcagagagtaaacaaaaagtggtgtctggctacaaagcctcaagacccatccccacaagctcacttcctccatcgactccctctcttagaagttccccaaccttcctccacagagcctccatctgggaaccatgagtgctcacatgctcatgaactatagaggacatttcacattaaggttatgacatgtctttacttaggggttgttttcttctccttgtttaaagagccaccatatttcactgctgagccagagagtcggattttaggggaagtggaagaaactatggacatcccatgtcgagccatgggtgagtatgggaagtcccagatggggacctgtggtcaatgactgtgactatcctatccttctagggggacagggagcatgaagttttgggaatattggacaatgggactcagtaaccagcctgtggtgttgctgaaggaagtcattgtgaagaccctgcttctttgtttgtctataacatagcccaggggtggcaagatgtaatgtctacttacccttaagaggggagagaagtttaggaagctcttaccccttgtctgcccgagagacagaggacacagaagaccctgtgactccccctcagggcctgggttccccagagtatgtgggcctaagaccatggctctcaggaaacccatcttcatccactagatgataaggactgagtaccatttttattaataattagttaatgaattaattaacttttaaagacaggctctcgtagaacccaggctggcttcagacttgcccttgattgaccttgactgagcacttatttgagctgcctgtatccacctctgagtgctgggattataggtgtgagccaccacacatggtttatgtcgtactgggaatggaacttggggcttatacctgttaggcaagcattctgctgactaaggtatattccaggccccgttattaattattttgaatgggaacatttcctacttttctgtccttttagctctggggcagctctcatgctccacaagtcattgtcccctcctccctatggctcaccatacctattgccctgtccatgaactttactatatggtttcacagggagttacataatgctgcccctcccaccatgtacacacacacacacacacacacacacacacacacacacacaagcactaccagtttacaaggcaatccgtttaccaagacctgtatagatgaaaaggctcttttcctgtctatttaaatctgacatcataaaaatagttttccttctctcagtaaacgctggaagggaagctttgcttttgtgagaaacaatgacccccactttgtaatgagagtgctggagatccagagtagccaatgtgaagcagtttattttacgaccttgctaagtctggcatcagcctatagaaaaggcagaaagaaaaaaaaagtcctaaattccctatccaattggttcaggataaaaagcttttatctaatggatgtcctggggctggagactccctccttttctgagctgtgactgactgctagtgacttatctaccctagcatgaactgggagcacctggacaagcagatatagcaggggacccaggcctcctgcttgtctctgccctctgatgagccttaaaggcacctcatactgaaaaacagaccagactgagatatttctcacactaccagtttagtgactgtcccagtttcacaagagagatgttacctctttacacacagttgacatctttcaccagagaaagcacggttacgtgttacactcagagcctccaagatgaaacaagttacatattggaaatttgtcaccaagtgtctggcatgtagaagctgctcaccaaatactgggaccattcagcaatgcaacagaagtccaaaacccagttcatggccatgtgccccagcacaagctcctgccatgacactcagatacctccgaaaactaatgcctaggactaagagcagattcacctccctgtattcaaccaacacagctctgaaatgggagctgtggggctcccaacagctcttggtaaacgcagtcgcctctggccagaagtcccttcccatgatttatatcagacctactctttggcagagaacttgcagactctggtccccactcctggtcacctcatcatggtcactctctaagcacgctgtgtttctgttctcctcagccacagctctgttaatgcagccgtagaggaggacaggagaaggacgggatggatgctgagtagagacacctcatactgtggtggccttgtcctcttccccctagcgtagcagcctctaaagtgtagggtgagaagctatgtgaagtctgtattttagaaatgagtgcattctctactgcacagctctactacggtggggcttacggttcccacttgacgttaaattgcccctaatagaaacactcccaccctcccgcgtagtaactattatttttcagtaaatgacaatctcaacattctccctgtgacaggagaaggctctcttcttcgtataatccctgcagggtaaactgttaagcatagacttgtaaatgtgtattgaacaggtcttccgcacagtgctctgccatcatgtgatttacagctttcccttaactctggcgaggagacaaaccgcatgggaggtgggggtggaggggcaccccgtgagagctacatcatgtaatcgccattatgaggttttacatgaattgcatatgcttttaccttgaaatgggttttaaaaagttgtcctgatttaatgagaggtgacaggaaacgtaattaagggaaaggactgcccgagaacacatcatctggaaatgctcccgacattagctctattcattcaaatgggccttctacacccacgtacgctgacatcgagtcaggggtctgcgtaagccttagagaatcctggcaaaatgtgctctttaaaactttaatccattttataatgccaggcctggaggcacgcgcctgtaatcccagcacttaggaggcagaagcaagaaggccagcctggctgtgcagcaagatttgtctcagaaccaaccaaaaaaaattcatttttatctaaggaaactgaggaacaaaggcagctaaactctagaactaactctttgtatctttttgggttcccatgtccgctgcatttctggagtttgttatgtcatatgggtttgggctggttctctgtggagcctcttgcacacctagttctcactttctggatgggtgtggtcttcttggacttggggaagggcagagatattccccaggaagctgtcttcccctacctagctgtgcacaggtttgagtggagggcctatatgttccctaccagactgggttgccccaggcactgaactgctgtggtccaccagccctggactatgtgaactgactgctgccatggcaaagaaaggcttcaaaagtccacatgtgctacttaggctgcaggcagttccctccgtatacccccgaggttatgaaagcctgtcttaatgtccacattggaagccaggtcttgtttctcacggagataccaccacacaaggaaggggatactaggcagggacctgggttctgagcttgtctagtcctctagtcctctagtctagtatcctgccatgttttcagcttactcagctcttgggggacaggtacagggcctcttgcaccccctacttcctgtcatcataaggatctgagggacaaagcaagttattcagggtccacaagctgacacctcacatgtccctcacctcctttaatcagggtgtccctaaggcttgcaaatcactccccccacagtatagactttccttaaggccattgatagccatcagctcattggatgaggccgtgtttgaagtggcctcagctttgttattgactgtagtaataagtacccacagtatccacagagcccgtgctaagtgcctggtgagagttttatatacaaacctgcccaatcttcactgcctctgaagttatattagcaatttgtttcattgttgtgactaagtatctaataggctgagaggtcagtccatcaccacagggatgtggagcatcaggaactgatggtcacattgtatctacaagtcaggaagtagagagagaggggtgaatgctggtactctgctcatcaggaactgatggtcgcattgtagccacagtaaggaagtagagagaggtgaatactggtactcagctcacttcctcatttgtgttcagttaagaaccccagccccagccccagccccagccccagccccagccccagccccagccccagccccagccccagccccagccccagccccagcaacggtgccaattcttcccacttgggtccactcaatctagaagctcccaatgaccctggaccagcattccaagcagggacagaatcatagacatcaatcctgtcctaaattcaagggcagttacagttgaaatctttctaagtgggtagaaacctagggccataaggtgagagtggggaggatcccccggcccttgcttattccttcttcctcttcagacctctcagtgtgggtttcttcatgtaagatgaggggcgtgtccccagtagatgggatgtggtccgagaagattgcttcagaagacacttagtctttccccgcctacagaaacctcctggagtgcaatgttcctctctgttcctatccaggggttcctcttcccactctccagtggtacaaagatgctgttcccctcagcaaactccagaaccctaggtataaagttctccccagcggaggcctccacattcagaagttgagtccagaagactctggaatcttccagtgctttgccagtaacgaaggaggagaggtccagactcacacctacctggatgtgaccagtaagtagcagtatggccagccttcaggtcagacagagctgcctcctctgctcagacacagggtggtagtaacatcctgtcagctcctgaggtgaaaggacagggccctgtgatggatgagcggtgagataaggagagtcatggccttcaagctttgctctttgaggctgagttgtccaaaagaaaaaaaaaaaaaaaaaaaaactactatttcagacaagaagaaaaatatttccattttctcccccctctggacagaatcagaaagactattgggtatatagtgtactactaatcttttccttttgatcttttttttttctccattaaaaaaatttcattctctactttagttttattgaacaattatagttcttttgtgggcttcttttattatcccattagcagaaataccatggcaccctgtctttgaaaaaataaaataaaagtacaggttctcactgtatctgcgggttttctttctaatctcccgcagctgtaacattgttcttctgaaatgaaatggaatttagcagttacagaattgcacctttcaagtttgcccttttagtggcaaagtgctgatattgcagatgtgagcaccactggggagtgtggctgtgcatgtgtgcatgcgtgcatgtgtgcatgtgtgtgtgcgtgcagaatgggactggtgattttctgtagtgtattaagagatggccaagttcctaaaatgcatgtgtgtatcttggtaaactgggaggtcactgtccttgacccccttgctaggagttacatttgtcctccacaccagagcactgggaaccaatcttgctctgagcagtagaaataatattgggttttgatgccagaaactgaatttgcatccattagaattatttaaaacctaccttccagctatggccagggtgttctgaggcagagatgaccagatagtttggggttgtgtgtgtgtgtatgtgtgtgtgtgtgtgtgtgtttgttttctttgaagggtctggtaatagatgttgtagactttaagaaacatggtctatgtcacagctacaaagcgcagaatgcatgcctgtgcagaagggtatgggagtgtatcgaggatagctggatcaccaccaccaccaacaacaacaacaacttctcctatcttgtagaaaagagtgcttagtctggcaaacactggtacacaggctgcattttatcccagcatgcccctgccgtattccttttatacaggactgagcagccctcacactgcctacctgtccccacgaataaaaagaagccacagcatggaacaggagttcttaaccatgtatttcagctctcagaatgctcccgggaagtgtagatgtgtcatcctgtagttggcacagtttgttacctaaaggacaaagacagtttctgtagataaacgtgctttctgggcccccggaacttcacacagggcttccacttccctatagacactaaacaataacaggtgattcctgggatatcaataacactgggttggagccactccagaatgactaatggttttgacatagtagccttccctctgattggtcctgcatgttctgtgtgactccaggcaggcttctcagagctgatgccacagctcactgttacctctcccctcctcccacagatattgctcctgccttcacccagcgtccagtggacaccacggttactgacgggatgacggctgtcctgaggtgtgaggtgtccggagctcccaaacccgccatcacatggaagagaggcaggtggctctgcagtggccatggctgctgtggaaaacactggaatgttggctgatttgttttcccttctcagtcactcagggaagattaagtaacatctattgaatacctctgacaggaactagatgccagggtgcagtgtgagtgagacaagtgagcccaggcttccagaaaacttggggactggggtccctagccctgtgtaccaggtgtacctgtgcaaagctctgtacctgtcatcctggaacaagagaggcagagacaggagatcctggaggcttgttggccagacagccgtgcccagtgcgtgagcttcagttcttagctgtaaaccttgtctcaaaaaaaaaagaaaaggaaaaaaaaaaaaaagaaaaagaaaaagaaaaaaagacagcctctacatatatgcacaccatttacatgtgaacctgtgcatatgcacatgtgcatctacacacacacaaatattcacatgtaacccatacactagtggttctcaacctgtgggtcaagagccctttgggtaattaaatgatccttttataggggtttacagccaacaggaaacacgggtctctacattaggatttacaacagtaacaaaattacagttaggaagtagcaacaaaagtgattttatagttgagggtcttcccaacacaatgaactatattaaagcgtcacagcattaggaaagctaagaaccactgctgtacacatacagtttttttttttaaatcagcaaggtcagtgggagttaaaaggtagtaataactgtgtaaatataactgtcctatacataagccctccatgagggcctctgtctgctggggtcctgaagatattaagccctggatgtgaggtaaacagaagcaaacacccaaaggcaaggattccatacacagatcctaatctgtttaacagactctcatagtgccaggcagctagcatgctcctggtattcacaatcccctcagtgatggtgggaaacccgcttcagccattgtgcacccaggatgctccttttacaaggagtattctcctgcctgctgccatcctccctcaccttccctgccagaggctgcgcctctaatgctcctctcttctgctcttcagggaaccacattctggccagtggctctgtccggattcctaggttcatgctgctggaatctggggggctgagaatagcccccgtcttcatccaggatgctggcaactacacctgctatgcagccaacacggaggcttctgtgaacgcctccgccatgctcaccgtgtggagtaaggaccattctctgagaacctactgtgaactccgctcttgtctctgcatgatctgtatcccagggatatcaatacccccttagatttttctcacttaatccaaagaaagtgattatttttacaactaatttatagaaatctgttgagtaattaaattttctgtttctgaaagaataattaggagacgcatccagagattcactggggctatttcaagagctgtaacagatcgactttttaaaatcagtagacttattatacccggttggctggaatagctaaagtaatgttttgattaattttataagaaaattgagttaatcattgatatcctaaagaaagtattagaagtctaaggagattgctccatcaataagatactttgtctgcaattatgagtttggtccccagcacccacataaaatcaggaacacacttgtaaccccagtgccatagcaacacagacaggaggatgctgtcttactgggcagcctgtctcattgtacacatctctgggtacatctctaggtacaggaagagactctgtcttgtgaaataaaatggcctccacacgcaaacatacatgtgtacatgcacacaaacacacaggaacatgtgtgcacacacaagagaaagtatttgttctataccatctgatttgtagctacattagacagggatgtttcttgtatagtagaaacaaacagtgggaatgtcctttgttcctccagcttttaccagcctcagtggtaggtcactggttcttgaagtacagagagaattgctttttgtaacatgacgatctgaacaccaaatgttccctacctctagtgtgtaagtgctctttcctcttgttactcctacccactttactaacagctcatttttccaacagaagaagccagcacacactgacaatctctgtaagggtctctggtgaaagagaaagttcaaattcactcaaataatatgtgaagatgtagtcggttctaaaacacacacatgtacacatacacgtacacacatgaccacacatacacacacatgaccacacatacacacacagaagtacatgtacacacatgtatgtgcatacacatttacacacatgtatgcacacacatgaccacacacacacatgtgcacaacactttcattcatatatggcatagtctctcataccatcactgtacattttgataaatgacccttttaatggagtttttaaatttttttcaattatatgtattcctgggggcagggagggcaaagccaatatgtacatgaatatgggtgtccacagaagctggaagagggttttcagttctctgaagctggaattacagacagctcaaatgggtgctgggagctgaactcagttctctgcaagagcaatatgcatgcttaactactgagccatccctccagccccaaataaccctttaaaaatattttattgggtattcttgaaacatcagaggttttatttttaaacttatttaaattcctgcaatattgacaaaatactaaaacggagtatgttttgttacgtttggaggttggagtcaagcagaggaacgtgcatggggaacgtcgcttcgcagccagaagcttgtggagaaggagataatgaggcttgactctccacagatcatattccagaaacttctgtggatctgtcgaggatcaaagttagggccgtgctatgtgacactaagtcagctcagtgcccagtagacttacccaggtttctcagtctagctgtctgtaatcatcacatggcctctcgtaggcaaagactcaggaacttttcctgagacacagctggcaggtcactatgctgggcttcaagggaagccctggaactcacaagttttagttctgtgtgtggtcctagagtggggtcccctggcttctgtgtggctgactgtgggttctggggtcctcagctgtgggacagccaatagaccctgtctctcaccagcagtgtggtcctgggcaaaccccacaggtttgctcttgtgattaaatcaatcagcacaaataaaagcgacttccaaagtcccggggtgctatgtgaacactagaaaatgttaacacgataattatcttagcaaagaatatagattttgtttatacactattttttttttacttatgtgttcatttacaacaccgggggttaaacctagggcttccaccattgagccacatccccagccctctttttaccttttgttttgaaatagggtctcataatgtttcctaggctgctcttaaacttagcctgtaatttgcaggacatgaactcactccatagcccaagctggccttgaatttgtgatcctcctgcctcaacctccatttctactctgctttgaggatccagacttcaggctaaagagacagctcagacagcgcagtgcttagcctgcaaagcttgagggtctgaggtcgatccttcgaacccacatagaagaactgggagcaatggcccttgcctattatcctatgatcatggagtcggaggcaggcagatactaggagctcactggccagcaagtctaccctacttagtgacttccaggccagtgagagaccctatcggcaacacaaggatcctcacacatccacaaaagacacagagataaagcactcccaaagagtccagactctaaatgtgtacacacagtctttgtctctctgttctggggagctcagagatcagggatgacttaggagtgggtatatcaactaactctgctgccacacagaaaggcttgtttttccattctctgaacatcactgagcgcttccatttacacccatttttgccaagatgagagagaatttggaggctttgatgtcagatgaccaattcattatccccgagggcacaggctcacacgctgctgacttcatccaactgtgacttgtgttgtttcagatcgaacgtccatcgttcaccctccagaagaccgcgtggtgattaaggggacgacggccaccctgtgctgcggagctacccacgaccctcggacctctctccggttgctcacactgctcttgttcattaggactggttaagattccttgggttaatagagggaaagtggagatgagaagtgagagtttggtggtggtggtcggggggggggtgtctttgattttagcagcagacctctgatgatgccatctctcagtggcgagctccatcattaatcacaggaatccgtcttccattccagacttatgtattatttacagtgggctatgctccactccgtggcttcaatacagctttttgtgattttcctgccaaggttaatacactgtctgtaaaacgcacttgtcagggtctgatacttaatgagacaaaaatccagagggatggaataggatttcagtggtgttgacatggaggctctgcagtgctcagggggagttttctatcctgcaaggacagtttttctgtatagtgggagaagaaaggcatgcaggtatccaaggcagtaaaagggaaacgtaggcagaggagcgagccaggaacttggagattctccaaatgccaagtgggacatcacgcagactagaagctgctcacgatgactgtgacacttgggctgggtgtgtggctcagttatagagtgtgaagccctgggttccatcccccaaactgcatacactgggcattgggatatgtgcctataatcctagcacaccagaggtggaaacgggagggtcagcaaaggaaagctatccttagacacatataattcacgacaagaatcattgtctcaaaacaaaaacaaggacaaggtggacatgggggcacatgcctttaatctcagcactggagaggtagtgaaatatctgtgagctggaagccagcctggtctacatagcaagttctagggcattgaggcctatacaacaagaccctgtctcaaagccaaaaaaaaagttcaaaaccaggccactttggataagcaaggcctggctgcagacaggtggccctcagcagtgagatctgtctcaagaagcaggagagttgtaacttttcagactcaaccctggaaataaatcaggtgggcagggaggaagggggagatggagnnnnnnnnnnnnnnnnnnnnnnnnnggagagggagagggagagggagacggaagagatcccatagcattgtcaccgcaccttagttctaaaaggctgcacttagccacaaggatggaattggagtccacactgaacagagggcatggctcttaaagcacacactgaggactgggtttggacatttgaccctcctctgccctttcagtgcaagtatttgcaaaccatccatttctccctccccacctgaccctccagagtctccaggactggaatgcagctgtcttccagcaaatgcaaaagccaaagggacagataggaagcataatgtttgactgcgggaaccctggggggcctgcccagagagagggaaccctggggcctgcccagagagagggaaccctgggggacctgcccagagatctccttcacacttaaagaaaactccagtcattgtaaaggcaggaggacatggcttttaaaactgctccaagagctcagaggttccactgggatggtccctttgcagcacgtcccgaggtcagtggaagataccccctttctgtgaaggacttgaactgtccccactatggatggacccaggttattagggcaattatcttttctcttcaaatggactatttcctgttgtctcttgtgttgcaaggtgacctcccgtgaccaattcatgaaaatctatgctgtgaatacacagggcagcaggggctggcacattttgaaaatgtaatcagattcttctaataaataaaaccagaactttcatcaattcagccatcggtagggcctcacccagggacatttagtactggacaggctcttaattgagtctataactggaaaagaaaaatgtgccaaaatggccctaaagattaactgaggaagaaaggtagagtcagagacagcctgctagtgtggtgggcctttagcagttagagatgcattgagctttgcctaggaagagggagtccctctctgcgaggtcctaagcaggactgaaacaggagagctaggcagtaagtgacaggtctgacccacagaggccctgtctcccagacacatgctcagatagatatccacagttgtcttcattgtcctatttgaggattttgtttgttctatgtgtgtgtgtgtgttgggggtagtacatttatggtgcacttatatacatgaatgtgtgtgtgtgtgtgtgtgtgtgtgtgtgtgtgtgtgtgtgctcgcgtgcgcacgagtgtgttcccatgtatataggcatatacatgtgaaagtacatgtatacctacttgcacatgcatggggagatcagagattatatgaatgcctttgatggatctccacttcatttccagaggcaaggtctcttgctaaatccaaattcagctagtctaccagccagcttgtcctgaggatcccttctttccctctgagtgcctggattacaggcgtgcaggcgggctaccatacccactccgcttttatgtaggtgctagagagctgaatttccagttcttaatgcttgtgcagaaagcannnnnnnnnnnnnnnnnnnnnnnnnnnnnnnnnnnnnnnnnnnnnnnnnnnnnnnnnnnnnnnnnnnnnnnnnnnnnnnnnnnnnnnnnnnnnnnnnnnnnnnnnnnnnnnnnnnnnnnnnnnnnnnnnnnnnnnnnnnnnnnnnnnnnnnnnnnnnnnnnnnnnnnnnnnnnnnnnnnnnnnnnnnnnnnnnnnnnnnnnnnnnnnnnnnnnnnnnnnnnnnnnnnnnnnnnnnnnnnnnnnnnnnnnnnnnnnnnnttgttttgagacagggtcctccacttagccaggatctcattggttaggctaacctggggaccagcaagcccctgggatctacctggtgttgcctccctagtgttgaggctactagtgtgtggtatcaccccagaccttccatgtggattgtgggaattaaactcaggtctttttgaatgacaggcagacaccaactaaacaacccccccaccaccaccaccaccactgcccggctttagtcaccaaagcacccaccagcttttataggttatctgagatattgccataaaactctcctttttaaatgatttatttttatttatctcttactgtgtgtgtatctgtgtgaatgtatgctgcatgtgtgctgttgtccatggaggtcagaagaaggtgtcagatggtcatagctggaattctaggtcatgagtcacctgacttgggtgctgggaaccaaacttgggttgtctggaagggcagggcacacttttaaccactgagccatctctctagccacaaatgatttctttttttaaaaaaagtttaacatggtcatgtttactctgctgtctaatacaccaactgcttgcaccttgctatcagggaaggggtgcggatctgctcctatgtattttgtgatcaaccctctgcttggcccacagctacgtttggaaaaaggacaacgtggtcatcacagcgtctagcagctccagaattgtggtggaaaaggatgggtcgcttgtcattagccagacgtggtcaggggacattggtgactacacctgtgaaatcatatccgagggagggagtgactcccggacggcacggctggaagtgatgtgagtaccaagcctctcctgtctccagacttccacgcggccatacttgactcatgtctgcccacatgctgccccatgccatcaacctgaggccagcacagccctccattcagctgtgtatgatggcaaggtcttttctttttcacccatgtgtgtttgtgtgtgtgtgtgtgtgtgtgtgtgtgtgtgtgtgtgtgtgttggagaggtgcatgtacatatgctgggaatagggctgggaggtatcgaggctagaggtcaacttcagaagtcacttctcaggagttgtacattttgtttgtttgaggcagggtctcttatttttacctggactcttctgatatgctattctggctggccagggaaccccagaagtctacatgccactgcttccccaatactgcaattacaagcaggtgccacaacatatgacattgttgttttggttctgtgatgaaactcatgtcttcatggtggcaagacaagcactttaccaactgagctgtggcctcaatctatccatccttccttccttccttcctttcttccttccttccttccttccttccttcctttatatccccactctgccttcacctctcccccatgacctcatgtttcattcttacatagatggtgtgctcacaggtcatcgtccccatgaatccttcatatccctgcacagacacctatcatgaacgctgtctacctcattgccattatgtggggatgagttccatgtgattgcccatcagtttctgagtggtgacaatgtcaggtcaccctatccaaaagtccagaaccaagcagccaactaggcctccaagtgaggtcatccgcagatgacacctcctactaagtctttcacactccttaagagcactgtcccgttgcttccagtctagaactctctgtgggttctgggctcaggtgtaagctttggtgcccctatatttcctcagctccctctctgatcacagaggaggaagctacaaggcctgctggcattgtccaccttttcaacgtgtatttatttgctttgtttaaaaaaaaaaaaaaagtgccctcccagacaatccctgaagtacaggaagagaaaatacaatttgcaaagagagaatggaagcctcacggctgctaaaccaggatctggtgtctgatgcccatctgcccgcccatcccatccactgcagggcgtgctgggccatcagaaggcaaccatgagaggcttttctttcagctctgcccaccttgatgcaggatgaattctgaacagaaagcattccctaaaaatagcatcagaaccctttgcatccaacgaagtctcatttgtctttgaatccccagcgtctgcgaggggattaggaatgaagagagtgcctgcagagagccaagccaggccttctgtgtgtgtcccaagcactcaagaaggagcaaattcgagctctccaaattagaggaatttaaaaggtcgatgaccatgctggagagatggctcagcagtgaaaagcacgggcagctcttgcacaggactggagttcagatcttagcccccacattggggatctcaggcctgcctgtaactccagctccaggagatctgacaccctcttctgacctcctccagcagccacacacatgaggcacacacacatataaaagatataaacaatggaagtttaatgatggggctggggtgtggctccatgggcagaaacatgccgtgcgtgcatacacatgctgagtttggatgtgtagcaacaatattaaaactgggtgcgatggatacctataatcccagcactagggaggcacagacaagtggatcactgaggcttgctggccagacaggttttcagaattggttagcacaggttaagtaatagaggctgtctcaaataatgaggtagagcatgatggagggagacacctgatgtcaacccctaactttcatatgtgagcatgtaagtgtaaacagacacaccacagacatatatcacacatacacaaatataccacaccacacacataccacacatatgtacacacaccacacacataacacacacaacatacaatacatacaccataccatatacatacacacacaccacacatgacacaccannnnnnnnnnnnnnnnnnnnnnnnnnnnnnnnnnnnnnnnnnnnnnnnnnnnnnnnnnnnnnnnnnnnnnnnnnnnnnnnnnnnnnnnnnnnnnnnnnnnnnnnnnnnnnnnnnnnnnnnnnnnnnnnnnnnnnnnnnnnnnnnnnnnnnnnnnnnnnnnnnnnnnnnnnnnnnnnnnnnnnnnnnnnnnnnnnnnnnnnnnnnnnnnnnnnnnnnnnnnnnnnnnnnnnnnnnnnnnnnnnnnnnnnnnnnnnnnnnnnnnnnnnnnnnnnnnnnnnnnnnnnnnnnnnnnnnnnnnnnnnnnnnnnnnnnnnnnnnnnnnnnnnnnnnnnnnnnnnnnnnnnnnnnnnnnnnnnnnnnnnnnnnnnnnnnnnnnnnnnnnnnnnnnnnnnnnnnnnnnnnnnnnnnnnnnnnnnnnnnnnnnnnnnnnnnnnnnnnnnnnnnnnnnnnnnnnnnnnnnnnnnnnnnnnnnnnnnnnnnnnnnnnnnnnnnnnnnnnnnnnnnnnnnnnnnnnnnnnnnnnnnnnnnnnnnnnnnnnnnnnnnnnnnnnnnnnnnnnnnnnnnnnnnnnnnnnnnnnnnnnnnnnnnnnnnnnnnnnnnnnnnnnnnnnnnnnnnnnnnnnnnnnnnnnnnnnnnnnnnnnnnnnnnnnnnnnnnnnnnnnnnnnnnnnnnnnnnnnnnnnnnnnnnnnnnnnnnnnnnnnnnnnnnnnnnnnnnnnnnnnnnnnnnnnnnnnnnnnnnnnnnnnnnnnnnnnnnnnnnnnnnnnnnnnnnnnnnnnnnnnnnnnnnnnnnnnnnnnnnnnnnnnnnnnnnnnnnnnnnnnnnnnnnnnnnnnnnnnnnnnnnnnnnnnnnnnnnnnnnnnnnnnnnnnnnnnnnnnnnnnnnnnnnnnnnnnnnnnnnnnnnnnnnnnnnnnnnnnnnnnnnnnnnnnnnnnnnnnnnnnnnnnnnnnnnnnnnnnnnnnnnnnnnnnnnnnnnnnnnnnnnnnnnnnnnnnnnnnnnnnnnnnnnnnnnnnnnnnnnnnnnnnnnnnnnnnnnnnnnnnnnnnnnnnnnnnnnnnnnnnnnnnnnnnnnnnnnnnnnnnnnnnnnnnnnnnnnnnnnnnnnnnnnnnnnnnnnnnnnnnnnnnnnnnnnnnnnnnnnnnnnnncacacacacacatacacacaccacacacagcacacacacataccacagacacacacccacgatccaccacacacagcacccccccctggcacacacacacataccacacacacaccacacatgacacaccacaaacaacaccccccacatacacacaccagacacacacataccacagacacacggtagcatggaaggacttactgatgtgtagcacccgtccagaaggtcccgtatacattcggaagctgaaacagtcctgttctacctcctgtttgcccctctccagtatgattctgattcctcttggacaatgatatctctggggagcaaaggcacccattagccatgatgagcctggagcccagtgtagtccttaagagcagccttggggcctatttggctttgggcatccatggtcttgttgatccccccacccccaccccccaccgtcatcattggagccctgagatcctttagctctcttggtcctttcctgtcctccatggtgtagcatgtgtcccctgctggtgttgcccacaggctcctgcctatatgtcctttagcattcagccccaggacggtttcctgccactcagtcactgtgcctccccgtttgtcctggcctgtcctcctcatggcatctcaaacacactggaagagaagtctgccatccaagccctttcctcccagaagtccctcagcgtaaatgtttgcatgctgggtgcctggcataccaacaggtgcccagcaagtgcacactgagtgcttgttggctgaaggcatgtaggaatacatccgtgagtgtatgttttaggccattgatttgcctctactcctctcttacctgcagtgtatggcatagggataaacgcacaggctgtctattaaaagcccagctccactgcccccacatcagatttaaaaaaaaaaatcactttgatgatgttggagaacacagactgtgaattcgcataattctacatgctattcacttttcttttcttttcttttcttttcttttcttttttaactaccttggagaactcttagatcatctagtctgggcatcaaataaataagtgttagcagttcataaaggctccgtcagcaccaacacaaccgcacacttccaatactgcacgttctttttattccgcaccttcttatgttctgcagatttacatatcttccccactatttacttatttgatttcctctaagtaaaatacatttttcagcaaatgttgctgtatgtataaaataataggctttctgcgatggtgaaacacctcattgctaaagatagaaatatttgcagatctgtgattcaaaccaatttgggtgccgcaggctgcggagctgagtcagaaggctgcaggcccctgggagttgctggtggaataaacacagtactcttccaagtcggaatgaatggggagagtggtacatcgttacatctggagctcttggggctagggagatggttcaatcagggaaatgctggccaggcaggtatgaagacctgcatatagatgtccaatgcctttacggaatgctgggcgtgatagcatgtgtctataatccccggggcggggagacagagacaggccatccaatccctagagcttactgggcagccagtctagctgaactgttaagccaagctgcaggtgcagtctctgttcagactctgtctcagaaaatgagatgggcagagacagtgagatgactcagtgggtagaggagcctgccatgcaagtgttgtgatctgagttcaacccctgtatctaacagaaagatgggagagaacaattcactttatacaagctgttctgtggtctccacatgcacatgtatgcttgcacgcagcacaaaccacacacacacacagaacacacaaacacacacacacacacacacacacacacacacacagacaagccactcacacacatacaaagctctggggacaccgctgcaccagtgatggccagagtgacgataatagcaacaagtcagaaatggagggcatcaggtgcctctcagagaaccttctagtccagcgctgtcacattcccatgattgctcagacagcaaataaacaaatacggaagaaaaagatgaataatgccaaagggacagagaggtacttaggcctaaacagtgtccttcaaaagcccgagagagcccccctttctctccacttcagttaaaagccactctgttaaattagggctgggagttggttcagttggtgaagtcctcacctggcaaacacaaggacaacgtgatccttagaacccacatgaaagagaaaggcagggtccctggagctcactgcccagccagtgtagacagacatctccgagcctgagaaagaccccagagtacaaggaaaaacatcaacagctcctgaagtacaatgtgtaatgttgacctctgcccttcatacacaggtacacatacacacaaatgcacatgtacacacacatatgtacacacacacacaggcgcgcgcgcacacacacacacacactttgatcatttaaaatgagcttgtgggaattccagtgggatgtccccatgctcattagctccgtggttgatcatttcagctttatctcgggcagaagctggctgagtgacgcttcatgcccacattcctggtaacaaggctgttgattacagcagaaccgtcaggagccaggatgaccacaggtccatcccaccttaccgtgggacttggagcaggtcgccttgttcctctccctcagttggctcagctggccatggcggcactgcctcacaggactgtcatggagtggaatcagccagtgttttgtcagttctgtgttgagcccagtagaagagggactctcgagaaaataaagctcctatggatttctccccaccacagaaggagcccagttgcctcttgtgttgtgggtctctttgtcttgaagttgatgcttccatccctgagactctgtgttacttttgaccatggcctcatgaccatctgacatgactcctgccacggagccctcagggcctacctcagccaagtatacagtaagtgcccactaaatgcctcgccccacttgctaagttaaaacaggaggatatttgcattatccaagacaagcagtgtatgtaagctctgatttaatcccctctctaaaattccagatggttctgtgatgtgtcctatacattagcaacagagatcttcatcagtaaacatggtcaccttgaaggctagagttgtagctcagttgatagagggcttgactagaacacatgaggccctagatcaatccctgggcatggtggtctacctgtagttttagctccctgaaaatggagctaaatgcctggaatttatggaatgcctggaacaaaccagacagctagactagccaagtcagtatgctccaagttcaaaggagagatcctgcctcaatgaatagtgtgacatgtggtcaaggaagacacctgaagtcaacctcagccttcacaatcacatgcacacatatgcacacacgtgtgagcatgcacaagttcacataacaccaatcacacaggcacaagacaaattccaaggccatccttggccagtctgggatacctgagaccctgtctcaaaaacaacaaaacaaacaaacaaaaacattgtcactttgggttttgatcctgtctttccttctagtttactggtgctgcagtggcaggatcacagtcctggggtaaccccatctccccgaaagcatcttgccctattgaacgtgccagaaaaactaggttcctaaggcgttatagagtgattaattgttcaatcatttaaagatccaattagcatcacctggcccctcctgcagtaagagtctaattcttaggagcctgaagaacagagaaaaatctaatttactgagctgactggaaggctcagaccctgaggcatcaggaaacgattctttcaataaactacttctgacaaagacataataaggagtgaacaatctgacgccatcccccaccgttatcaggccccgagtcttcctcctcagagcaaagtggaagaagatgggtttgaccaagtcacgatttgtgcatcaaaggggcaaagctttcctgatggagaaagactgacctggtcctctttctcaggagcaattctcccttggccacaattttaccaattgttcaaaactgttccaccctcatgaacaccacccttctcgtctccccccgccctgtgtgagctactatgccattgttaatgcccaataatactatggtctaagtgacttggtgccaatttctccatcccatttccattgtaaggtgacttggaactggcctccatttccatcgctccttttctctttggcttgtccccattgggtattgtcaggtccaaaagaaactcaggacaaatgactaaactatggtgcctattagcataccaaagcacatgctggcctccagggtcactcagtcccaaggctccactcagctctacccaccctaccccctaccctaaactccaactcatgggcttcctttctgatacattttgtaaaactcagtatgatgcaccaggaaggggtgccttagccggcccatgctgaggcacacacacccctgccctgccaggtaccagtcatagagtaggtctagtataaaatgcagtttatttgggagcatgggaagggggattgagaagtagaggcagagaaagagagggggcagagaaggacaaggagagaggagagagaggaagaaagaagggaagaggtcaagagggaacagagagagagagagagagaggatgagggggaaggaaagggagggggggannnnnnnnnnnnnnnnnnnnnnnnnnnnnnnnnnnnnnnnnnnnnnnnnnnnnnnnnnnnnnnnnnnnnnnnnnnnnnnnnnnnnnnnnnnnnnnnnnnnnnnnnnnnnnnnnnnnnnnnnnnnnnnnnnnnnnnnnnnnnnnnnnnnnnnnnnnnnnnnnnnnnnnnnnnnnnnnnnnnnnnnnnnnnnnnnnnnnnnnnnnnnnnnnnnnnnnnnnnnnnnnnnnnnnnnnnnnnnnnnnnnnnnnnnnnnnnntacaccctctccccccaccccctcttgttcctctgtctctcttgttcctctgtccatgcttctcttcctctctcccatccccccacccctcctctcacggtccacttctgtgtctccctgctctggacgattccatatgcctagggctatatctccctcatatttacaataaaaccttcccctcaaccgtacctcagagcagtcatgtcctcactttatacagtcataaccatctgagaacctcccaaaacatcatccatccaccctcctcttaaagctggcagtggcatgcttgggtatagtcagtatactcttactggataagattcagagtacatgcaagccttaattatccattactgacctgttgctcaagggttttcccatgataaccatcatcaagttaggagaaagcctcgtgctggggacatctcagtagttagaacacttgcagcataagcgtgagaacctgagtttagatccgcatcacctatgtaaaaagccatttctagtggcacgtgaccataatctcagtactggagaggcagagacaggggaactcactagtcactcagtctaacggaatcagtgagctccagcttgagtgaaagaccctgtctcaagggagagggtgactgagaaaagcatctgcacgtgaacatgtgatgggacacacatacacactcacgcacatacacacgcacacacacatacacgcacacacactaaatacatgtaaaaaaacaaacagccatatgtgagctcctaggggtcttattgtgtacatacggcaagccagggcaaagactgcctctgaggctttgtgtgtgtgtgtgnnnnnnnnnnnnnnnnnnnnnnnnnnnnnnnnnnnnnnncatctgctgatggggatcactctgtgtccacacagtgacctggagcactggccactcctgctgcttttcaagttcatgtttgttgtgtcagaccagcttctattatgagactgtctttgcagtggaattcagacactaattaattggaattagcacagacctactagtcaagggcatgcactccagaacagctccaagcttcaggcagcagctgggagcttggggcttccataccacctaccaagctaaccagctggggcttctcctacaccctcagctgcagagtctctacacagagctgtggctctggctgcaggttttataaaggagaaaaaaatgcatgaccagatcaataatgagctggagagttgggaaacatctgaatctagccatgtatgggacagctgtagtatgcagctatgcacatgatctgcatgaaggcagacatgcatgcgtataacatatggggcaagatccagtcaattctacatcctcttatgtatggctttcacatcttacctcatgacaccagccaaggacactcagcagagccacatccaatagacatttcctgattagctgaatgcctccagcttccttctatcccacagaagtcagaaatggagttgacactccagcctccaaactcatggcgcctttattgtcctggacctacctactgcccagctgtgtaaccccataaccagtcattgagctgtggtatcccaggaatgacagagacaaccccatccctcaggatatcccaaggatttagaaactccgtccattccagaccagaaaaacactatttttatcaacagttttacctgggtatttttagacaagtactatactcttggtttgtgtaaaaatgaatatcaccaacttgacagaatctagaaacaccaaggagacacacctctgggcattttagggttgttgtgggggattttaagtcaactccggcagttttgtcacagcaacgagtacagtaacaaatggccggtttctacttagggccattcaacaacgttggtcttgtttcagaccaaacctaatctatcttggaggaaacaaaaagaaatggggcttgagagtggatattatcatcctgccctccctcttgaatagtgtttattggggtctaatggaggcttggctatcagataagttaaatagaaagaggagcttcttatctgatttcaaacttgagtcacagttaaggagaccacaagacaatattccacactcaagacttgtcttgtgtgtgtgtgtgtgtgtgtgtgtgtgtgtgtgtgtgtgtgtgttatctcacgctaacacacagcacagttctatctctatgaaacatgttcatttgctaacgggtagatgggtgagagtgctatgctccttacacagctgagcacagacaactgcatcagttgtgaaatagaacaggtgcgtttctctctgggccacgctgaggacggaaaggacttgaacaggagctatcaccccaacccacacggacatttttaaatgaaaagtatcaggtttggggctgggaagaggctctgtgggttacgcacttgctataccagcaggaggacctgagtctggatctccagcacccacatagaaagctgagtgtgtccagattgagggggcatggctgagaggcatagaaggaggggaaactaatcaagatagatgagagcaatatcttttgttttgtttggggtttggggggtttttttttggtttggtttggtttggtttggtttggggtgtggttgttgttgtgtccttttgttttgttttgttttgttttgattttggctttggtgttttgagaccaggtttctctgtctagcctttgctgtcctggaaaactgtctgtagaccaggttcgtcttgaactcagagatctgcctgcctctgccctctgagtgctagaattaaacacgtgcatctccactgaccagcaaagagtctattctcaatgaaaagggattttttttttaaattaagattagaaaaatcacttgggatggagagatgcctcagccattaaaggctgggtaaaatgtaagaaaaatccgtgtacacctgtccactggagaaatggatgccagaggatccctgggcttgctgagcagcccttccagccaaatctgtgagccctgggttcaggagagagcctgactcagaaaagtatgtgggaatgattgagcatgacaccgaacttccacctgtgactccacatgcaaatgcacacagatgcacatacatgcacatgcacacacacacatatacatgagcacacacatagtcaagtatacagggagccatggtactgtgtgctgagattccatcattgttagatcagatgttagagagtcatagcaagttcaaggccagtgtagccaacataataagtttccagggatgatggatagatgacagatagatggatagatagatgacagatggatggatgggtgggtaggtggatggatgaatggatggatgacagatggatgacagatggaagttccaggctagccagggctagtaagacccagccaatcaatgaagggatggatggatggatagatagatagagctcccaagcttccaaaatatcaagttgaatgttggcatttgatctgatccatgtggttctctagtaactgatatccaagagagacccagaacaaattagtggggacacaggtcaccacttggaagccttcccatctgtggtaccaggtctgttatgggagtggcctccatgaagaaggagcatggggcaggcccagatcccaagtcccagagatgtaaggctgaaccaaacttgcacagtttcattgtcaaggtagagacttcatactgtctccagtaaatcccagcaaaaacttggttttggtttgttttgggttttttgtttgtttggtttttggttttttgttttgttttgatttgaaattagtgacttcttttttaaacttatgtaccagagttacacttgcactttatggccttgtccgtgtgttatttactatttctataggtgtttcattgatttttctcactacatctactcataagagctttccccagacctctattactctccctaagacagagctacaatataacctcatgctgtggataatttaggcagtccacttgtctaagaagcagggagagtggaaacccctcacactgggcagatcctcgccgccaggcaccaggctttcctctttatagggcttctgggtttacatgaacagcctctagctgcattgacaaataattgactacattttgtctcattaatgatataatgccaggccaggggtgtggctcggctggtaaaaggcttctgcagaaacaggagaacatgagttcagtctcaagcacctatgtaaaaaaaactgggtgcaatggtgagcacccataacctcagcgctggggagacgggagcagaggatccttacagccccctggcagccagcctagctgaatgaattggtaagaccacctcaaaaattaagtgtaggcgttcgttttagtttccttccaattgctgtgataaataccttgacacaaagcaacttggggaagaaggatttgtcttagctcacatttccaggtcatggttcattatcgtggagaagctgatgtggcagaaactcgacgcaggtagttgcatcatatccacagggataaatgaattctgtgcttaatgctcagatggctttctccactcttacacagtccaagtttaaagcccagggagtgatgccacccacagtgggctgaatctgctcacttcaatcaagacaatcaagacaagcccctattgatatgcccataggctaacccggcctagacaatccctccttgagattttcttcccaggtgattctaagttatatcaagttaacagttaaaactaattatcattaatacctgactcgatctctagcctacatatgcacacacatgcacacacacgcacacacacacacacatacacacacacgtacgcacacacacacacgcacacacacatacacacacacacacgcacacacacacacacacatacacacacacgcacgcacgcacgcgcacacacacttgcatacacaaagcaacaagacaaaatagaatgtaataaaagtacacacagggcccctgtgaagttacctgtgttgtgattgaggaaccgcaaaattcacatcaaattatgttcgaattacaccacagggggtgggtctggtctcggtttgttcttaggggaccacagagagaggactagttcattctcattccataaccgcacacactagctcttgccatcacgggcatcagatgacccataagactgacttcccctgttttcttgttcttttcacttccttgcctctagtgagctgcctcacccacctcaaaacctgctggccagcttgagtccagcacgcagccactcggtgacactatcttgggttcggccctttgatggaaacagcccggtcctttactacattgtgcaagtatctgaaaacagtaagtagcaaaacaactgtcagccccaaacataaaccagatgtgtgtgtctttgtgtgcatgcatgtgggcgagtggggaggcatgggatgggcctgggaaaacctaagaggccagaggaggatgttagaggtcctgctctgtcactcctagccttaccccaccctgagacaggggctctcactgaacctggagctcagctagtgaccagcatgccccggtgatcctcctgtctctgcttgccatggcactggggttacacaagtgccagagatctgaacacaggtcttgtgcttacacagcaagtgttctcgctaacagggccatctatctcctcagccccagacaccagatttcatgtgttcttaatggcatgtcctttccccaccccacagctgatggggacacttggccatgcttcacgggtaacaaagcaaaagcaagatggtgtgtaggagagggaagagccatgtggcctggggggtgggggtccttaatgggctctcgagagggcctggacttgagaccaggcctaaccagagtagctaagtccatgagactgcctcagaggttctagcagacagtgttatccctgcggcctgttggaaagggggtcacggtgcctcctggagctgacctcagagtgggcagtagcaggcctttacatcttcggagggttttgtaacttcctgcctgtcgtttgtggaagcccatgaacagagacaggaactaaacctttagatctgcactttgttcagagagcaagccctctgagaggacagtgggtcagcatcctaaatgtttgcctacatctcgtcatcagtgatgggtcctatgagggagtggggggcgcaggcagtcaatcacctcagagctgttcgtcccctcaggaggtcagcaggtttctgaaacttgtagtgtctgtgcagctgctgcatctctggtcctcttccttccatctgcatgtcaggcatgcacacagtgcctgaatccagttagtgcctgctcttgtcaacctgtactcctccagggcacctgggatggaaggggttaactcagaacagtgtgtgtgtgtgtatgtatgtatgtgtgtgtgtgtgtgtgtgtgtgtgtgtgctgctggtagcatatgtgtactgattccttcctatgacagagccaggtgtgtctttacattgcagggtatgaaggtctccatcacttttctctaaggtagacatggtactcagtagagcatagccctgtggcttcctccctgcttccaagacacttccttaatcaactctggcttccctcctccctcctccctcctccgtcnnnnnnnnnnnnnnnnnnnntccctcttcccccctcccccactaccttcatgccttttcctgcttgctcctccctgaccccctagtgactctgccagctcctcagtgacacacaccagggatgtcggtcagcagtgacaagcgcagaggcacagctacacaccatcacgcccggcatcctgagaaatcccctttaatcttttagggacctcaactcaaataaagctagattcctgatttcaccacagaaaagattcagggtgagccagcaagaaactgagcctgcgtttattaaaagacaactttaatatgatttttaagcaggaggattaggaaaaagtgaggtagttgggaagaaagatgggcctgggcttctgcccctccgaccctttgtaatattcatgcaaaggccatcttggtattattgatgctgttaccctcaaagtgttaccaggggacctaaatgaagtcataaggattaggggtagagggctgaggggcacctgacagtgctgactctgacagagtgaaacactagctggaaggtatgcaggacaatggggcatcttccttgtaaaagttagcggtcttgtttaagattcccagagaggaatgaggccccaggtaaggcccacgtattcaggccccaagcctgcttcatgtctaggttaacattcttcttggagatgcctctgtagaaaagagccttgtctctgtgttggccaccttcacagcagacgctgttgcctgagttggaattctcgccactccgctggccatagcttaagccagactccagtgtgagtagatcctttcctccctgtgccctcctcatttctgtcctgcctcagaacccagcccagaggcgcccccatctctccctagttgttgcaacagacatagatgctttcactagcatctcaccatcatttcagccctgacctcggtcctcttttcccacccagcatttccttcaccgggagcccagttcctatgtcactcaagccacagactggaaaccgttccccataccctccaccccacccacccgagcagcagcagttctggccatcaatcctaggcttctctgacgctcttgcccaggccctctcaggatcccagtaaggaaacctcagctgccccagttgcctccccaggccctgcatccgtttttcctttcttagccattctttctacaaacatcaatgctgattctctccaaatagcaatggacctggcctctccctgtgagcccctcccagctcctgcagcatccaggacaaagcccaaagtctccaatcctgagtaacctccccttgctacaagctttctctttctcaccttgctgggcatgcatcaattacaagggctccactttgcccctcagcccctgccaaaagggccatgtaccgcctccatgtttcatcctctactcagaatgcttgcagggatagtgttgtccctcggccactattctcctccaaggggctccacacagcacaatgtaacttttgggctataagctagggtcttccttagcattgtttttttgtaaatcagggatgggttctaggtaagaattctaccaccaaccacacccacagcctttcattggtgggttctaggccagtgctctactgatgacccacattccagtcccttacaggggcactttaggcagcctcatcaccacaggattctaagcatgtgctctaccatacagctatattttatatccactttctggatcctaaatccatgcctcagccgcactagcaggcctggacacagctcacaggagatgttggagtcaagcctttctccctccttcacctctgacctcacttccttccatagaggaggcaatcctgggactaggctgcatgataacagtgtttccgtttaacccccagtcagagaaggaagagacagcattatttattaaaataacctttcagaagacaaggttttcctgaggatgtcatggctgtgtggcctttgacgataatgtgtgtggagagaatgtgacaggagcagagctcttgtcatctgaagttgacagatatccaccataaggacagcttccggcaggcatccatctcctggagacaaagagccgtgttctgctcgattttgtgtccctgtccctggagtttagtatctactctgaaaatgagataacatgaatctggcagagccaccaggatagacttatgcatgacactattccctggggagatgggaacaaacatccactcacccaaatagggaacccggaacagaccatagtaacaatactaccaaagtacagtgagtgcttggggtcacccaaaaggtgacttacaggagcagggtccaatcaaaggcagctgcatcatcaaaacccacttgtcatgactgacaggtaacgattcaagaaagctggaaccctagagctctctgcacaacttccaggcagctcaaagggtcagagagtctcctcccctaagccatcttaagtgcttatgtaactttggggatagaaggggccatgtccatctggtaagtttcaggaacttcctgaggctttccatttgtttactttctcagttctaaggagcctccccttagcatgagatgcttcagttcagaggagagtgctatacaacatgacattctgggcagtcttccaccaggaaactgttctaccttccctttttgtcaccaaagcaggcactgattcaaaatactacacaagccatttcccaactgacagcaagacttatttttccagtcaggcatgctgcctaaatcagaagcaagatttttatgtaaccatccatccatccatgttgattgaccaggcagtctgaggtgtgctggaacacagacataaagtaacttcagacaaggacgtggtcaaacacatcagcgctcaaggctcaatcagtaaagaacctgatgtgcaaacccaaagacctaagtctgaccctccagaacttacaatagcaatctgggagtgatgaagccctttggtcatcctgaggctggagaagtggagagcagtggatccctggtgctcacttgtcagctagtggagcttaatcagtgagacccactgcaaaaccttgtctggaaaaccagtgtggacaactgaaaaatgatggcctccacatacacatgtacacacatgcacctgcacacatatgcacacataatatacacacatacatatacaaatttacatatgtgtgtattatatacatatgtgtgtgtatacatatatgtgtgtgtaaatgtgtatatgtataaacacacacacacacacacatatatacattagggtctgtcactactttctgtttcttgtgtgttaaggttctgcagttaaacccagtaccttggacatgctaaacaagctctctatcacccagccaccctgccagcccctatctgtccttacgcttgaccaatggtcaccaagagcacacaatagtcaatttaataggtgtttttcagatgcttcagtttgctaagaacatcccaaagactggcactgactggtccctcactgaccagttgactctctcatctggacccagctcggggctgcccttcctcctgccaagcattgagagggcagaacagttgctgcgtgctggtccttgacttcaaaccgtaagataaatctatggccttggtggaagcagcatgtgttgttaccagttggttggtcgtatgccttcttatcagagggtcgcctcagtcatctggacctgtgatgagctttttatttttattaggaacgagtgctgttaagaagcagctgaacatgcagactaattacagccagagagaagcgcttagcagcaggcacactgaaatggagattgtatttggcccacactcaacactgaggagtggacagtgctaaataaccccagctacccacccaacatgccagctacttgggagagcggctgctgccaactttagcagcctagcaggctgacagggctgctgttctcctgaatgcccaggatcctggaggaaccaggcaggtgcggctcagtggctgaggcaggggcctccttaatgcttgatttcaccacaactcctaccattaaagaaaagctttctctgaggtttatagaccaccatggaggagcgtggttccatgcacttaactagagtcaaaactgcgtggagaatgtctggcccctgtagtcatattaggttcctcttgccatgaagtttgatggttctcttgttgcaagtgcctcggtaagctagaggcatagacagagctgacactgtcataagactgattcagggtacccacctggtgagctgaggtaggcaggtctggagatacaagcagaaagggcttctctatcgagctaaattcctggaccttcgagtaacatgagaagttggtcataaaatgaaaagcagttttcttactttctaaaatatgtactgactgtggccaagaacgatgtgtctatggggtcagggtttttaaggagagctgttgggaaaagaacttgaaaagctctgatgtagaccaaggatgcaaatgaatgcaggtctcaccaggcgcctcctctgacttgatttcaccgaggcttctctttgggccatcttaaaactctgtaaattctagaaaagtcgctacaattcaagtaattctggtctgtaaaaatgaagatggatgcaaatagattttatgctatagaaggtagggctgtgcctgattgtagctctgtagatattgatcagttttgcttctgtttgtcaattcattttagcattattgatgtacgtacgtacgtgcggtttgtttctttcttgacacaattggaacatcttattggaatcagcgaactaattaaaactgtgatacaggactggggagaccattcagattcagggagagaccctgtctcaaaagtaatgaggggtgcaactgaggaaggcactgacatcatcgacctctctggcctgcccatgcatgcacacgcacagacacacacacacacaagcacacacagcaggcacatctgcccatgagtgcacatacacagacacacacacacgcacacacagcaggcacacacacacacagagagcaggcacatctgcccatgagtgcacatgcacagacacacacacacacacacacacacacgcacacagcaggcacacacacacacacagagcaggcacatctgcccatgagtgcacatgcacagacacacacacagcaggcacacacacacacacagagagcaggcacatctgcccatgagtgcacatgcacagacacacacacacacagacacacacacgcacacacagcaggcacacatacacacacacacagagcaggcacatctgcccatgagtgcacatgcacagacacacacacacatgagcaggcacatctgcccatgagtgcacatgccagacacacacacacacacacatacacacacacatgagcaggcatatctgcccatgagtgcacatgcacagacacacacacacacacacacacacacacacacgcacacacagcaggcacacacacacagagcaggcacatctgcccacgagtgcacatgccagacacacacacacatgagcaggcatatctgcccatgagtgcacatgcacagacacacacacacgcacacacgagcaggcatatgctcaaggttcttctgtgtttgtaaaaaaaaaagctgtgatgctcctttttaaataaatttatcactgaacttaaatgaacatttggcagtattaaaaatgcacactctcaatgtaacactgcaagtttccatagaaaccctgatatttaggagaggtgattcccattcctaaactgagaccctgcctgttttccgtggactgggccaaggcatcctcctgatgaacaagagctgcggttgccttttaccagttaggaagaaaaatcaagtcattttcttaagatagtttttaagcttagtgcctgctgccgcctgcctatctcctggtaagttatccatgctatatttatattttaaaaaacataaatacctgatgatactagttcttaggttttgcttttagtaagtgtgagtgttcatagctacaattttgtatttctaaaatttagacttagttataagataaaaatctttgtactttagttacaaatttatatatactcatagccaggtatagtagtgcacacttgtaactcccacactgagagagttaaggtctgaggattgtgagtttgaggccagcgtgggccatctatatagtgatgccctggcccaaaagaaaaaaattaatagactagaaaatagtcactagagtccttcattccatgcctgggtcactcttgctacattctccatcacgtggctgcatcattcagtccctctcggcctccaggtctccctcactccggctccttctgcctaaaggagagggctctgctggtcatcacaactttccgaccctccctccctattcttcactggagccatatcctgcctcacccctgtcgcacccctaccacaccccggttacgcctcaccacacctctgccaagccttgccatcctgagcctccttcttgattgctccttccattctagagccatcctgaactctttgctcctgtggccccacctctgccccttttttcactcatggatgtgttggggtgagcgtatgcctacagatgtccatgcacgtatgtacacatgtgtgtggagatcagaggacagctcagatgtcattcatcagttgtcatctactttgttttttgaacacaaggtctcaagttacagaactcaccaagcaggctgcagtggctcaccagtgcgccccgggggttcgtctgtcttcatttccccagcactgggatagcacatacagactaccacacctggcttgttatgaggtcctgggaattgaactcaggtcctcctgcttgcttaacaagcccagtacaggctgagcaatctctcccctgcttcacctcttattttgctgtctctccttgccctgatagactcgatcttctctcctgtcccttatgtgttggtggtccctgaagcgtcaagaacacagcctcctcatccagctgcttgaccaatgactctgtgtgcctctgctattctccttccccacagagacttgtcagtgtatctctaactgaatcctccccgagccccagtctgcagtccaaggaggctacgcctggacagcttccatgctcagacaagtcctcctgtctactgcagtacttgtcacctttgccccagaacatgcttcctcttagctatgtgaagctatttagggttcctgccacattccccccacaacctacttccttttaccctctccacaactgctgatggagtaggaatgccactctgtcccattgtcctgtgtgcctccctcaaggccattcctcattgagccactgggagctgctgcagagcaattcctaaagggagcttggcttgactaagatcgaaggtaggaagtgttatgtccctttccgcctttaggaggtgctattatttgcgctgaaccatacactaggcccagccaagggaattcctcctctggaaacccctttatgggagccataaatgctccacggagcactgtgcagcaagacagggagcttggttcataggataggctacattattataatgtaacccaaaggttacattgtatccaatcgctggcctatcttctcaccgtcttgctatcctaagtctatcctctgtagaactagtcgcttgaggaatagattctaggctgattagcatgggagacagtaccattcatcatctggccactgtctgcctctccatatttgtctccggcctcttactggtctgctttctctgtgcttcggcagcaagcattgcttgcacttccctgagcatgtctgagaattatctcttccccaaacccccacccctcccattcctgacattctgtgatccacttctacttatcaagtcctgtcagctgtgcccagaaagtgtcaggggcactttcttcctccctactatgtctttccacaaagatggcctaggttgtgctattcccatcttctcctcaaggaggcgcagccacagaccgtctctggcatggtaaacacagtcccggctcctctgtgtgctgtccgtggtactgaaccacgcaatgggcgatgacagtccttaaggtacagtgacaacagatggcaatcgttttgttttgttttgttttgttttgttttgttttgttttttactaatctcattcttcaggtttgcaaagaccacctcctatgttttcagcagactcgtggttgtaacctgtgtcttccatccgatagctgcacacgtgtacatatttttgatccccagcacagctggacatgttttttccaagttgcttagcttttttctacttttcttgctgtgatctgtcagctttctttcccctatttttctaatgaggattgggtatttctttcgtctgtcatttgtgacaagtctttttgctttggtttggtttgattttttccaattttctttttgcacttaatttttgtagattttatttatttatactgtaatcaggatttcatgtatcccagcctgctctcaaatttactgtgtagccaaacatgaatttggaattctaaacctcctgcctccatctcccacttgctgagatggcagacatttgccaatatgcctggtttatgaagtaccggggattgaatccaaggctcagggcgtgctccctaccaacagaacttcatccaacccagcactgtgggttatttttgacaaagaagtgtttgattcttatgtagtttagtctgctgctgtttctcttacgttttcttctaattgcttttgtatttggatattttaacattatcaggtataaaataaatatcatagatttgcacctttattttaagtagttaattttccacatatgtaacatatgtaattcacctggaatataggcatattatacaactttttctggttttcattctacacacatgatttattgaacaatccacttatttataatgctaatttttcacatgctaaatgttcctgtttttaaaaaaacaacaaacaaacaaacaaaaacaaacaacccagacttgacatggtgacacatacccttgatttcagcactgtaaaagggaagcagaggcaagagaatctctctgagttggaggccaacctagtctacatagcaagttctaggacagtcacagctacatagtaaaacactgtctcaaatttaaaaaaaaaaaaaaaaaaaaaaaggtctgggatgtatttggacctagttggtcatcatcaggtgtctttggttggggggagggggtggttttgtttgtttttctacttgtagttcttgtaacattttaatgtgttttaaatacaatgacttccctcatcctcccagattttactatttctcatcatgagaaaatagaactattgtgtgaaattgcaaaaaaaaaaaaaaaaaaaaaaaaaaaaaaaaaccaccaccaccaaaaatacaacaaaaaacaattccactgaggaataacactttgactttgactgggcctcataatgtcctcctgcctccgtttcccaactgcttggattgcatatgtatgtgacttacagatgtatgtgactacgtctgtctgggtttcattgagattttaaggaaggagttaaagctgtgctgagttctatgaagactgacttcttggttgacccatctgcccatccagagggtcctgcactactactactactactacttcttcttcttcttcttcttcttcttcttcttcttcttcttctttttttggtttcttgagacaggtttctctgtgtagccctggctgtcctggaactcactttgtagaccaagctgccaggctggcctcaaactcagagatccacctacctctgcctcccgagtgctgggattaaaggcgtgtgccaccacgccccagctgggtcctgcacttctgcattcactctcaggatcgctttccaacccctttgagtcagtagccaggagcattctgctctttctttccatcaaggttgtcattgctaaggcagagtttctcaccctgtaggtcaaactaccctttaacaggttatctcacagcagatatcctgcatgtcagaaatttacattacagttcataacagtatcaaaattacccttaggaaatagcaacaaaaatatttttatggttgggggtcaccacaacatgaagaactctattaaaatgttacagcactaggaaccactgtcctaaagtgtcaactccctgctttgtgatttggactttcccacagtcaccacctcccagcttgccaaggttgggacacaggaggcctattgtcatcctggcacttgcttttccactgctacttcccattctcttgttattctaatgatctttctgttgatcctcttagttttcaaagtaaacaatgtatcctctccactaatagaatccattgtcttctctttgtttttcctatcttgctgggctatcagaatacttttaaatgataatgagcctggtagagtcgcctgttgttttgttcccccctgatctcagtagaatatcttctaggattttggtgccttgtataatacagatttctttttgttacatattgagtcacaatttgcatagaacaaaacacagatctaagtgagctctgacaaatacatctatctatacctgcagtccatgctttgaacatgtgtgaatcatttcaactctctagaacatccactgggtccctgtccccctcccttcccccttcgacccttcgaattctcacctccacaaatcagctttgcctgattgtgaacacacccagaaagatgctggttggaatggttgatatttcacagtaaaacacacacactcacatacacacattctctctctctctctctctctctctctctctctctttctctctctctctcgtgtgtgtgtgtgtgtgtgtgtgtgtgtgtgtgtgtgtgtgtgtaagggcagccatgtgagaaactataaccacccatctcttcagctttaactcttgccccaagctttctgttaccgagcttagcagagcaccaccaggtggactgccagagatgtatcctcttctagccattgctgttagcacctgggcagagcctaaattcatcaggagacaaagaacactcaggaaactaaatcacaaacccagggacaggggacatggcctaagttggcatatgaacatttttccagggaaatgtttctgagagtcaggaccctcaaaggaggagtcagaaaagccctcttggacgtgaaccacatgtggagatttgcaggacctgggtatgtgtgctaccctcataggagctccagggtacagaaacctggatgcaggaagtattgtggcctccctgccatgcccagcacatgtatttgcaagagcagaagtttcccagtccaagagaagccagtggcaaggattttttttaaaaagcattttcgatgtagtaatatatatgtttaagtccagggtaatacatgctgattgcagctagaaaaatgttagcagacatacaaagaaagacttgcttatctgcctccaccacaaccaactgttgctggcagtctagtgaattcccttcgacactggagagagagacctgtgaggaatatgaagggaccagaggatgtcaggcacatcccacacagagctgttgaacaagcttttaggcagcagaacttggcaggcgcagagagaacagagcttgaggctccaggctggaatcgtggagggcagtgtggacagtcgcccacccctcagttgctgatagacatcccccagatgggggtaccaggaacagtctggtctttgggaaacagaaggcttctgtggagtgtggatctgagcagagcatcagtggtcatgatgagctgcagcgtgtgagaggctgttctgggattctgctgatgatagaaagtgtagaatattctcaattctgcagtgacctgtcccacccaattattagttttatgttatttgtctgtcaatttgtcagtctgtctttgtctctctttcatactgaaggctgacctcagactcgctatgtagctgagaatgaccttgaactcctgatcctccagcctctaccttctgaatgttggcttggcaggcctactccgatagtgcaagtttatgtgttgcaaggcttggaaccccggaccctgtgttttccaagcactcgctccaccaactctccacccccagcccacctgtgcttcctttgtatgtgtatatatggatatctgtgcacatgtgtgggggggtacattcacccatgcatgtgggtataggggatagaggttgacaatggatgccttactctattctcctccaccttgacttttgaaacagggtctctcattgaaattgtaggccaccatttcagctagactagccaggcagtgactcctgggtcccacctgtctctatgccctcctcccagcgatgaggttacagacatacatcactgtgcccagcttggttcttgtacttgtacaaggagcacttcatccactgagctatttctcagcacctctcagctttctgaagtggggctgggtgtcagcttctggtccaaggctagcttctagagaacactctctgaggctccacactcctctgagcatcctctctagcatcactggaggccaggactctcccaacacagagagagcctggaagcatggttttgttcttttccctaatgccacaggtgtcttttcatgtacagacccttctgcctcacacaccgcactgtgtgagctcatttgctctgctctgcgagccgctgctgactgtcatcacacaatatgttaaacatcttcctccacggttgctattatgtccttaaaagctgatgggctttgtgctgttttgcttgtctcgatggcagaggctttgttctctgtgcttcagagtgctctggtgctgtctttgaaacttattgcacaggggtcctgctgacaacctctggagctgttcaggagtgcttccaggtggctcgttgtcctgtgggattttacatattgagcctcaagctccccttttaaaatgcagcccaagagaaagcacctgtcacaggtattgatggccattgtgggagcccagaaatggactaggatgcgggtaccagggctcatatacaggttgttctctgcccttatggagaagatggttgacccacgtatcctccatgggcctgcacttgccttatggaaggctctaaacatcatgacctacagaaggtcattccttactgtacgcatgtcacatgtggaggccagaggtcaacctaaggtatcttacctccaaagctgttgaccccccccccttccctctctttctctcctctctcctctctctccatctctccctctgtctctttcatctccatctctctcttctctcccgctctccctccccgcccccaagctctcttctctctttctttcttcttttgttttagaaagggtctcccactggccagtaaaacaccagtgagtctatacttaccgatcagaaatctccagggatctgcctgtctcttgctccccaccacacacggcattgcaagtgtgcactgccttacctggcttattacacaagtgccacggacccaaactcacatttgcttatgcattttctctgcttttaatggtggagaaaataaggactgagggatggagaaatggctctctagggtagatccaggttttatatggcttataaaatcctggagctcatgttaacacacacacacacacacacacacacaccattcaaagggtctctgctaggactttgtcctggtctcattcctgttgctttgacagaacactctgaccaaaagcacctgagtagaggagagcatttatttggcttagagtccatcatttcaaggaaagcaagacaggatctcactgcatcacacccacagtcgagagtgggagagacagatgcacccatgctacctgctggctgcgtccactcagctggttttctttactcagatacagttcagggtccagcccataaaagggcaccacccacattcagggtaggtctgcccacatcaactagcctaatctagacacgccatcggtgacatgcccccaaggcttgtgccccagctgcctttagatcccgtcagggtgacaatactaacctctagccaaaagggacatttggtggccactgttagtggtgggtatagttctcatcctatgattccactctaccccagaggcagcaggtcctcaaatgccgccctcacacagcggcacggtccacacttggaacccaccctatcctccagggctacagcatggggaccaagcatgcctgctttggctggagctctcaggcgccctctgctccagctggtatgcaaatgcacatggattcaagcacttgcatgtgtgcacacaaacatactcatgtctccccctctccatttttggtatatgtgtttgtacttgtaaagagattcctgtgtgtgtacatgtgtgtacaggccagaggtcaaccttgggtgtccttcctcaggcactgtactgttttacacatagtctctctctggactgagagttcaccaagtaggctaggctagctggccagaaagtctcagcactcctcctgtgcccaccatattgtcttgttttgtgggttcagggaattgaattcaggtgttcccacttgcaaggggaactctatgcaccaagccatctacgcacccctttgctagagcttctcttacaaaacccagaatctcttaggacagaccctactcagaactttgtaactggcattttcttccttcacttatgaccaacagtttgccaacaaacccacctttttaaattgttttctcttgataagcttactgttataatttagcagagttatcctgtgtgcctcactttgagtcagtctctctctccctctatctttctctctctctctctctctctctctctctctctctctctctctcctctctccctccctccctccctccctcccttcctccctctcactcctgttggtgctgcgtgtgtcccagagctgatgcatgctcagataccctgttttcccctgctgtttgttccctgtcttagagcccctcccagaatccctcaggatgctcagccatcacacagccttgggcttaggcagcaggacagtttctcagttgtccctctttgccttgaccgtgacagctttgaggatctctggcggttttaggaacactgctcagttggagtttgcctgatgcttctcttgtggttggcctgtgtgagagaatgtccttctcctcagatcacgtcaagggctctccctgtcagtttgacttagcgccatcattgttaaatacaccgtgtgtgtgtgtgtgtgtgtgtgtgtgtgtgtgtgtgtgtgtgtgcgcgcgcgcacgcgtgtctgtctctgtgtgtgtatctgtatgtatgtgtatatacatgtgcaaatgtttatgtgtgtgagaccatgttcatgtatatagacaccaaaggacaacctaaggaattgttctcaatcccagcactccttgctcttttgacacaaggtctttcctggagcctacagcccacctatgaggcttggccagcaggctagctagtgaacttcctgtcttatctccttagcactggggttacaagtgtgtgccaccatgcctgaccctcaaaatacaaacaaaaaaatgtgggttctggaggttgaactcagtctctcatgcttgccacgcaagcactttactgactgggtctctccccttgataagtcttttaagctccagcaatcagcttagttgggcctggattcggctctcagctgcacctgtcttgagtgtgcagcctgatcccaaggaaatgcaacatctgtgctctcatgcaacatctgcaaatacagcctgggtgtagtgggaagtgtctctgatttacgtgacacctcttctctgtgacacagctgagatctttgtgggcacaggagaatggctcagtatcttgaccatctcagcgactcctttagtttccatggatggctaggcaactaagagatgtgactgggttcaccaaggcacactagcactctatgtcagtagcagctgaggagacactagcttggcttcagtcacacacacacacacacacacacacacacacacacacaaacacacgtttcattaaggccagctattccctcacatggtaaggaactgttagtgtcaacacacagtgcttgagtctcataagcttcagagtgcagacatgtgcattgaggaaaagactttaaaactagaaataatcaatttgctctttaattaagacactgagctcagtatcctggagggactggatttgttttctgtttatgtatggggtatgcatgtgtctgcctgggtgcgtgcaggtatacatgtacaggtgttcatttgtaggtttgcatgtgcaggtgtgtgcaggtatgtaggtgtgcatgtacaggtataagtatacaggtgtaagtgtacaagtttaagtgtacaggtgtgcgggtgcaagtgtgcaggtgtgtgggtgcaggtgtgtgggtgcaggtgtgtgggtgcaggtgtgtgtgtacaggtatgtaggtgcaggtgtgtgggtacaggtgtgtgggtgcaggtgtgagggtacaagtgtgtgtgtacaggtgtgtaggtgcaggtgtgcaggtgtgtgtgtgtacaggtgtgagggtgcaggtgtgcatgtgcatctggagatcaaggtcaatgtcaagtgtcttcttccatctctctcccccttggtttttgaagcaaggttccttggtgtgtctggtgctcactgactgacccaggcttgctggccaattagccctacagacctccttgtctcttcccttcccagtgatggagggtcacctggctttttaggtatgcactgcagatccacaatcaattcctcatgtggagcaaatgtttctatcctctaaccatctctccaaccctactgttttgttctaaccaacagatccctcaccagcctctctcttgcctggtcaggggctgtggtaactaccctgagggcgcccagtgccctggatttgggccacatttggatttgttgctgaatccatccccacatcttcctttagcacctggaggctggatttgagtcatattccatctgtgcatttgtgcatatattatctatgtgtgtgcatgcctgtgcctcggtgcctgtgtgtataggcatgggggcaaggacatctgtgcacaccaaacatgagaaaaagaaaaagaaacagtaaacccagcagtcgtctgagcccacacacagaacagagtgatcaagtcttaatattctcagcctttcagagtccagaaacagctaccaggtcaggcaggagaggagcatgtgagggggaggaaggaggcagcaggaggcaatgggaggcagtgggaggcacatgtgtcaggcccttcagatccaccactggctcttcagtccttaggagggacctcactggtagtcttgtgaggactggcttgggggagcatcttctcaaaagactttgcctgttaactgttgggtccagatgtgctgcaccacttacatcctagtgctcagcaagtttatcgctctggagcttgtgaatgaataaacaacttcccagactacgattggggggggggagggtacaaattagggtacctgtgagatggactaggctcattttaatcagctttacagtttaatttctctactgccagatctcttatcttctagaagggatagagatagatagatagatagatagatagatagatagatagatctatagatgagactggagcagtgacaggacgagagacacagagaagaacagggatcttcatcaaatcaaaccaggcaacagactctgtgtcttaggttatggacatttaagagctgatatgatattgatttgatactaatacaggaacagcaatgtcttagagtagatttgtgttgctgtgtcagaatacctgaggctgggtaatgtgtaaagaggggaggttatgtcacacacagtagagaagtagaaaggaaggcaggtacatatgaggcggccaaggagaggtgccaggtgcgcttagaaactagctctacaatggagaaaacttgctcctacaagaatggcactaaacctttcttgtttgattgattgattgattgattgattgattgttgttttgtcttgtctgtgtgtgtgctgaggattgaacccagggttcataagtgtaggcaagcccacagccccactcttccctctaaaaggtctctatacccccccaccccccacccaagcactgcatgtcaaaaacatgccctggcatcctaacttcttctcttgttgctgtgagaaatactccaacaaaagtaaccccaggggtttgtttgttctcgtgtacagtccatcatggcagggaaaccaaggtaggaggaactagaagcagctggtcacatcacatccgcagtggggaagcagagagcactgaatccatgctgctgctctgccttttctccacttatacaagtcaaggatcccaaatagggagtggtgccgcccacagtgggcaggtcttcctacctccatgtaatcccgaaggcttgtccagagtcttatttcacagttgattctagattctgtcaagttgccagttaacactagccatcacgtcagggaagtcattctcaacatgaggcttgagggggacataccagattcaaagcccagcaggcaacttcctgtcctaagccttctctgaccttcccttgctctgatgaatttagtccaccaactagcagcctccttcttccaattttgtcccccaatgaggaggctcactcgggtctctaagcagagtagctgctcactttcaggcagctgaagagaaggctggcatgagctgcctgagagctatatatacctccagggttctgaaaggaagtaggtggcccagtgcgtgacccctgttgttttctgtttgtttgcttgatatcggtttcacgatagatgtgaggtgacaggccctagtgagcttgatgatctctcaatttcacagaagttcaaaggaaacggagcatctccacgtgaagcgttcactgcaaatgtcgctcttcaggttcttcccatctcacaccagctgtctttgggatggaactagttctgtaaatgttaaccttggcaaagggaggctctgctcctaccagcctggcccagttcctcagtgtcagagacacttgtctgaccttctgcattgtcagagacgctcgtgacggactctgctgagaaactgcagcctttgtgggctgaatgatagtgacagaggctcagagggaaaggcttttcatccctaagggtgtacatattgtggagttgtgtgtgtgtgtgtgtgtgtgtgtgtgtgtgtgtgtgcccgtgtgtgtgtatggtacatacatatgcagatgctcatacccatacatgagtaggcaaaagcgtgatgccaggcatcttttcctgctgtccaccttactgcctcaggacagggtccctcactgagctgaggctcaccatcttcgccagactggccagcatgttctcaggctctgcctgtctgtgccccagaattggggcttcagacacacactagctttatacgtggtactggtgattcaaacccaagtccccttgcttccagagcaagccctcttacccactcagcccaacaccgtgcttttaaatgaagcataaaggaatccctgtcaacagctaattacccaaatcaccaaaaaatcaaaagccaggaacataacatggcccagctggtggcaaaaactgtattcccagaaagctatgcttggaagcagctttgtctataatcatttaaaacaaaaatccatctttacagcccaactggcaccatgtttggggcagcttgacttttgtgttaaggaatctcagctaatgaattttgacctggggctaggcatcccttttgttgcctttggggtgcctgagttctgttttggagcagtataaggccacctcgcagtgacctgtaagtagctggagtgacaggtacatttcccacgaacccctgatgtatgccatgacctccaagttggccatcagctttctgcagaagcagctgtgatttttatgggtggtgttcctgtgtagctggtgtttgttgtccaaagactgagcagaacctagcccactgggaaccacacattcattctctctctctctctctctctccatttttagtgagggccaaaggaggttgctagtaacactgcctctgagggacaagaacaatggtttggttcccaggagagcctgccaggcacctatgtgttcagagtaggaacccacagcagatgctgaaaggcacagcaggtcacccttggctgggctgagaggcacagaaaatcataggacagcagcaattcctccagaacattcccaagcctaccttgcaggcaactgcagcccattctgctgacaaaggcatccgttcacacctgcaggaaagctgcttccgaagggtgcacagaaccacgagttctatgccttttcccagccagctcagctcagggcgtggcagaaacaggctgccgctcagcagatgggttgcgaaatgcctagcccgtccatatttaatcaccgtaatttccttattaaaatgttaatgaatatagtgcttatttatcatcccctgatgtgtggagcatccttttcctggagacaaatcttcgacctgcctgatggtgagccaagggacaactttccccactttataccgagctcaggaattaagacttttcttccttctcttgaagtgccatatgcaggctgaagaagaaggaaagaaaagtttattttggctgaggggacggctcagttggtaaagtgttgaggacccaaatttaattccccagaatctatctaaaactgtctggtgtgatggtgtgagcttgtcatcccatgctggggacacagagacagaaggcttcctggagctcactggccagccaatctagctgaataagtgagttccatactagtgagggatcctctctccaatgcagaatgacccccaaggttgattcctggcctccatgtgcgtgatagtacacatgcttgtacaacattacctgtatgcatagaaacacatacacaaagaaagcaagaaaggagggaggcaggcaggcatgcacactttcttactcaggatcaatggaagggtctttctgcccacttgtcttggagtgtccataggaataacaggaggttctgccccagatttagggtgagtctcctgaacttcatgccagcagccatattgctagccacacagcggagagccttgctttgcacatttatgaggtgggctaggcactgcctctcctagaaccgtctgggaaagcaaacaggatggttcttgtccactcactgtggagatcaatgctcatgcatgctgactcgctctgtgcattcttgtagactctccatggaaagtgcatttgtcaaatgttggcccggagatgacaggcgtcactgtgagtggcttgactccagcccggacctatcagttcagggtgtgcgctgtgaatcaagtgggcaagggccagtacagcacagagacaagcaggtgagtgagcctgatgtcctcctagagcaagggtggtgtgggtcccagcagtagatactgggaaatctgagcagggtaaatcctggcgtgtattcagctaactgtacttccctttcacctgttcagaggccactgtcataaatccttccaatggtgctctctgacttcacaggtcattcctgacggcacagccttctttggggtgatgggggtaagtgggtagggtctcatgtagtccaggctggccgggaattcactgtgtagctgaggatgatccttctccctctaccaaaacagagtgccgagattacagatgtgaacaccacacccaaattatatagtgctgggggtaggacccagcgcttcatgtctgtcctagcatcatttccgttgctgtgataaaataccctgataaaagtaatgtaggagaggaagggtttgtttcagcttacagttccaggttactgtcaatcaagccgctggccatatcatacccagggtcaagagcagagggaaactggcacacacatgcttgcttgcttgcgctcatctagatttcctcaggtcaggatctctttcctagggaatgatactgcccacagtgggctggatcttcccatgtcaatcaacttaattaagacgatcccccacagacatgcctatagaccaacctaattaatgtaggtaattcctcattgagactgtcttcccaggtgatcctaggctttgccaaggtgacagaactaatcagaatggtaaatgagcgacatatgccatacatctgccattgcctcctggccgagttgttgccatgttgactgtcatacctcatgcacacacggcctcaatggggtcagctgcatgtttggggctggttttctcctcaaaaagcctctgggctgggcaccttgttgctgtccctcacttctctccctgttatatttcgcctttagattgatgttacccgaagaaccaccgagtgctcccccaaaaaacattgtggccagtgggagaaccaaccagtccatcatggtacagtggcagccaccacccgaaacagagcacaatggggtgcttcggggctacatcctcaggcaagtacctaggacaggccttcagggtgtcccattaactgttcaggtcaagtgacagactctagggagggatgctgactggagcaaagcagatttcaaagctaatggctgcctctgtggagcctctctgggtatggtcaccttcagaggtcacacagactagcatcagaggttgcactgaactgaagaataaaaggggcattatgggaaagatcccagacgtgtttttcctggtgaagccttccttcagagaatatgtacatttataagcacaatcacttaatgaatactaattaaattgatgtagctattaacctacagccactatgctaacctgttataccattttgccagatcttctggcatatcaaagaaaaaaattttactgtgtgtatatgtatgtgggcatgtgtacttaagtgtaatacccaaggaggccagaagagggcctctgtcaaatgcactagcccagtggtttgtatgtactgtatgtattaaagggtcagggcatgaaaagagttgagaggcattgttctaaacagatacttctgaaagagctgtgggcttttcctaataactcttagagacaaggtgcccaccgaggtctcctttcttccctttattcattatttgtaggtttattatatttctttcactatttaatgaatagaggtgtgtcagacaacaacttgtgggcgtcagttctggtcttctaccgtgtgggtcccagaaatcgaaggttatcagctttgcagcaagggcctccacctggtaccattcctctggctgtatctttctgtgtcaatgtctcaggtagctcaggttggcctccaactaacattgtagcccaggataaccttctcctcctgatctcttgcttctgcctcccaaaggctggaatgacatgagtgtgctaccacacccagcttgaaaatgtcagtcctttagctctatttgctttgactgcgaagggcatatgactttagtcacccactgttcagctaaccatgagaagggaggctggacttctaagtacggtgggaaaacctgaaataaaaatggtggctggagagaagtctcctttacccaaaatcccttgctctgatcaagccagagctgaggatcacagtcagctccctgctgtccctaaggttccccccagcccaccatcttcccttaaccaacacccagccttgtctgtctaatggggcttcaaggatcaatagaaagtcaatgcccacggttcctcagttcctcgtatctctactcacagctgtcaccctccatttacaaaaggtcagagagctacagcagtgtcatcctgcagcagtggccctgggctctgttccagctggtggcagttgccagtggcctgaccttcctgcccatcctcctgctgcctcctgtggctcaaggatgactttccctccaactttagacatccctcatgtccgcacccatcagctaatgaaaataattagcttgccctctccacagccgccgcctttctcagcagcagaaggaagtttcccgaggctgagcctgtcaagtaggggctgtgatgtttgtcccattgaacacgcttggggcagagcctaataataaaactgtctgatgttatgaggcctcacggtagactgcgcatctctctattttgcaggattactgtccttaaaggatccttggtgacagtgctgttggagtggagtaggggaaagggcatctgtgctgttgacagcttaaatccaagaaaaccctcaaaaaatgagggcacaccaccccaggccttaaatatcaaagagtgtggaagttaaagacctgtaccaaaatgcatttgcctgcaaacatttctgagcaagactccagcttgcatatcgttgtttgcgagcgagaaccctccagggcacgggctctgtgtcggatccaacacacaacgcatgggagcaaatggaaaataaatcaccttggtggctcacaccgaaagaagtagttaggatactctcacagtgataaaatatttataataataggcagcacatttctccgagcagcgctcagggttatgtccttagaaagaaagaaaaaatgctctcctgtttatttctggataaaaactcatctgttctggctcagccagtgtccagggtaacagatcctcctagaaaggagggagggtgctctgagagctcctccctcaccttgacctcctcagacatctggcatacatcaccagagttcctagagcctgggcctgagtggacctccctgcctaactattttcaagaagtgaatcttagagatcgctcattgagtggctgaggacactgtagctgggacaggctttgtgttctgagcaaggacttcagcttgtgtccccaatactaatttcataatttttccatggagagtgtgctgggtagttaagggcttcctggagccatcccttttcaaggcttgttttgcaatgtctcctagaaggctgtaaagaaacatctacttaggacctggggagagattgctcaggggatgagagggctggctctgcagacatgaggggctaagggtgaatcctagcatccacataaagaactgggtacggtatcacatgtcagtccccccagggctgcacctgggggtaggggccagacatggggagctctgaagttcatttaccagcccacctacccaaatggatgagctccatgttcagtgacagaccctgtgaaagagagggtggctgatggtgacctctggcccccaagtgcattggtatataggtaacacatgcacacacacatgcatacacacacatgcacacacacacacagacacacacacacacacacactcatatacacatgcacacacagacacacacacacacagacacacactcacacacacacacatccacatatgaacacatagatactgtacacacacaaatagaaacaataattaaacatctcctcggcgctgtattgaagggggcacattttgacagtcataaggaaaaggatggtggacaatcccttgggtgcatctttcttgagagagtggcaccgaggtgtccttacagtggagatgcatatccactgggctctctaggttatatacctaataggatgcattaacggtgagatttaaagaaagatgtgcaaggcctcagtttcaagttaagcatttccttttgttactacaatcttatgcaaattttgtggacttcttagatcaaggagatgaggagtgagacattgacacttggggctgcaagcattttgactgttttgtttggtcggttggttttgaggcagaagttcgtgtaacccaggctagccccaaactccttatgcagccaaggatgaccatgaccttctgatcttcctgccttcactttccaagtgctaggattacaaactggcacctctttatccagtgtaccaggtgccggggcacaaccaggggctccagcttgcaggcaagctttctgtcatgagccacacacaccctcagcttgtttatttaacatccttgtgtgaaatctatcccaggctactttgagaattatctgctgatgtttctagactctcagttagcaggtgacacaacttggatcccagcaggagggctgtctttcccttcttaggtcccttcattgtgtctgcattcctagcctgcctctgagggattcattttgtcctatggtctccaagggctccatccatatcacttggctctgttatttctgagcttgtgttgagacagagtcagagcagaaagacctacagaaagactatggaggagccaggtacaaaatatacattttgaaggcttggccatagtgacctgccttctccagcaggccccacctggttcctgccaactcctgaatcagttatgaacctgctgattagatcagacttcccccatccgacccaccagggaggagtcaggatttaaacatgagagtttatctacctcaaaacacaactccacctcaaatgggtaaggagcatattctagaatcaaatctaagtgaccatggtccagggtcacagacttagggtcgcttcaaattctgggctctaacattattacagctccttgaagttttgtagtcaaggaacaaaaaagtcataaatcaaagcactttttcagctacagtgatagaaaaatgggtaggtaaagcagggctggggtggctgggtggcgggggtgggggtgtcagctattgccctcagatgctagctaatggcacacacagccttttggttggtggaagctagtggtctgctaagctaattcatttcatccttgttaatcacaatgatgttaagtcagacatagaggtaggcaaggaatggctatcaagggaaggtggcccaagattaattttaattagactttggacctgcaacactccaacctcccccacagtcactgaagttctgctagtcagtcaatgagtctcgcagggcccaacaggaagtgcaggccttctcgagagcttgaaaattcatgagtgtttggtagaatgaagagaaaggccagctttgaccttcatgcctttaatctgtctacccttcagcatttctgttccctaccgagtgggcctcaccaagcacaaatggttcctaaaataagaaggatatcctcagaaagtcctggattgcaagaagaaacttgtatggtttcatttgcatatccctcaaggaagtcacagtatatacaaatacctgcatttccaggtcttgtttgttttttccaaccatggtgaccttgctgacctcagagtccctctgctgggtgtgtccctttcctctgctctgtcgggcacgctgtgagaagttagcaggtatgctgcctctctgtctgagcctctgtcaaggctcgctctggatatcacacaaagctgcatctccgagaggcactgctttgagaagcttcaggatggctgtgcgtgtctctcatcttccccgggggaactgatccagaaaagctctgtgaattaactgagccacttcagtacattaacttctataaacggaatcatggaaaaacatttgctaatcaaaataatgcaggagaaaaaagcctttccacagtacaaaagccgttccctgaattcatgcctcttttttttttcttttttttaagagctggcttgtgtaagcatcttgttaataaatataactttaaatttctgctccagggcattgaagacaaattacccaaggactcacaaagcaccctcctcccaccccaccccacccccaaaaaaaacaccttaatttgtcatactcagacattttagaagttttaacacctttacaaagccacttactatgggtatgggatatctctggacagtctagactattcttaaatggaaacagaatggacttggacagaggacttggacagaggccaggaacatacaggccgatggcttcctgatttctccccacaatgcactctcaggaggcagcctttctccccacccctcacagagatccatggtggaagcttgacccatagtcactgtacgtacttggcagttcacaccatagccactgttcatacttggcagttcacaccatagccactgttcgcactgggcagttcacaccatagccactgtacgtacttggcagttcacaccatcatcactgtacgtacttggcaattcacaccatagtcactgtacgcacttggcagttcacaccatagttactgtacatacttggcaattcacaccatagtcactgtacgcacttggcagttcataccatagttactgtacatacttggcagttcacaccatagccactgtacgcagttggcagttcacaccatcgccactgtacgtacttggcagttcacaccatcgtcactgtacgtacttggcagttcataccatagtcactgtacgcacttggcagttcacacctgaagtgtaaaatctttaaaacataataattcagaactatgtaacttgggtgttcaggaagctgagcatggatccaagtgaagcctgggctgcatagcaaaccctgtctctaaaggaaggaaggaagtgggagagaggggcagagggaaagagggagccattattttggttccaacagcctacccctccccatatcctccttctagcagcaggggcactctaagccttaactgatggtgtaggctttaagaataactttggctaatctctcatttggggggaggggcatttctattacttttttttttttcaaaaggaaaacagactgggtgcagaggtgcatgcatgcagtctcagaacttgggttgagatgtgaagattattgcaagtcagagcccaatctggactacaccagtggctaggatctctctcaaagcaagagtaacaaaaacaacagaactttcccatgaccatacagaagttcaagtccactctacttcatctggagtttgcagtcaccatgagattagagtatagcaagcatgaagccattgtccaaggcaagctctggtcagggatgagctcaaagcccagttcatggctgcttccctctgccttcctcttgaggtgattccagtccactgcgggcggtgtccctacggtactcacacccgtgcttcctctcggctgcaggtaccgcctggctggcctgcctggggaacaccagcagaggaacatcagcagcccagaggtgaactactgcctggtcaccgacctcatcatctggacccagtatgagatccaggtggctgcctacaacggggcaggcctgggtgtcttcagcagggcagtgaccgagtacaccttacaaggaggtgagctgcgaggtggggggtggggggaaactgtgggaacctgggaactggggttggcaaggtctgattgaaatgtgcaactctcaagtgaaatgtctacaaaaacacaggtcttacctcaaaatgggtaaaagccagtttattttggagccagatatgagtgaccacagacaaggaatacagatttgagttgatccaaaaagtcgtactccactgttgtagaacaaagaaagtcataaatcaagacactgttcgaattccttgttggaaagctcacagcaaagcaggatagttgctgtctcaggcctgttgctgtctgatggtgtcacaggcctcagatactgtctgaggctgtcacaggccttggatgctgtctgatggcattcctgggctctgagtgggtggaagctgtaggtcttttttatatatagcaaaaggatttaaccagcagtcttaaggttgttaggtcattcatggaactgggctgggaatgatgaaatcgagggctaaagagagctcaaggtgctttggctctggacttgtaacattccaactctcacagacattctaatcagccagtcaaccccatagaaggtttgacatgattatgtgttttatttctctgggagcttcggtttctgagagccttgagggaaaatctaaccctacagcagccagtggcatagcttcctagtagcttgggttcctctgggatctggggacagaagagtctatgcacgtaatatatgggggtctctggagggtctaggaattcagactttcctaaatggaccatagttgtggttttgctcaaggagccagtccaattcaccatgtcactgtcattacctttcgaagcgaacagccattcacaattctgctttagtttatgactacggttattgggaatagaattcacaagttttgtgcttttcttcctgtattatacatgccaacaatgtaaaatcagtagaagctccctcacccctcaaataaatagtcaggaagaatgtctgaaagccaggaggtcctcaacatatataggctaagacagccccaagatatagagttaagcctttcaagagagaataactctttctctgctttctggaagattccccagttatagccctgggcagctgaatgacattcacaggcacataacattgttgtcctgaacagtaataaataggccctttcttaatgtccacattgattctatggcagccccaatcctggctgggggacacaatttcccctcctggtctcaaagccgttcttcctcatgcagcggtgtatggggctttcagttcacaggtgcagttttcccctcctggtctcaaagccgttcgttcttcctcatgcagcggtgtatggggctttcagttcacaggtgcagttttattttcctaggcacttttatttctatcaggctatgaccttttttcaaatgataaggtttctaactgcccacttctctccccaaatcctgcctcagacctaatgttccttgatattacatgctgttattatcagcccttattgattggctgtcggttgtcatctgagagtccataaatcctcctttataaattaaaaacagtcagcgctgcctgcccagcaagtagcagaaatattaaaatgctggacagctgggcaggacttgcccatctgcaagggactcctgaccacccatttgaagaggcaaacagtggacgacctggacaataaatgcttgctttaatgagtccgtttaataaaataacaataaacttgaagacatttaaaatgactaacatggaggctagagaggtggctccatggctaggaacatctgtagcattcacgttgaacaacttaaagctctctgtaactccagctccaggggatctagcgccctcttctggcctcagtgagcaatccactcacgtgcaaatgcatgtaattaaaaataaatctttatgaaattatgaacatggctatggattataccctattatcattaactgtgactcccccattgtatttccagagcccttgagttctgtgtactgccagggaaattgaggcctaattaaaaaggactttgagattagaaacattagctggtatgtagttggcacttgagaaccatgatgggtttaagtgggaatggcaaatgctgacctggaagatgtctactattaggtttctactattgtgactatagtaaccacaaccaaagcaactcctggagggaagggtttatttctacttacaattgccatcactgaaggaagttgagttttgttaaatttagggcagaaacctggaggcaggaactgatatagaggctatggaggggtactgcttatttactggcttgctcctcaagccttgctcagcctgctttcttatagaacctaggaccaccagctcagggttggctcataaagtcactgaaagtcaaattccacacacaaagttggggttttagagagcagccccccttttatggggaaggttggggttgataaaaaccagctgactagagaattggttgttagctcctggacagaagagtaggggactcagtctcaaggctgcctgtggagtagataagtgtaagatacattgtttggaaatgaagcatcgcaggtgttcaggagctcagcaaggtaaaggggtgtctatgcatcatgggattcagtgtaagccgaaaatcatggcttgtaggatacattaggtttgaaacagaaacagttcttgtaaggtgtggagacttagtaacaatgtataataacgtggctcctgtttggctcctgcagtatgaacctgcagagaggactaaggctcagcactgtggtaggggttgtgggggtagtgggggtggggcttgggttgcttcctagtagcctgtgttggaagaatgagcaggcattcaaatgcacagcccctcttagtcatgacttctgcatgcacccccatctgccccccacagaccctgaagcttaatcctagacacaggagggctttgtgggcaatagctgatccacacttcctttgctgctgggaggccacttagtgtccctggagtgtcctatagctgctggagctgtgcgctggaaaagcctggagtaggtccttctagcagaaaggggggaaatttaaatgcttgcatattaaaagagaaaagaataactcataaaattaattgtcagcttcatttgggaaatcatgggcgtgtgtagaaacataatttggcagtcaatctggagacactgagggaggctgggaatgcttagctggggaggtaggaattttagtctacccaggcctggtttcctctcccttcaaagagggtcaggaaagcaccctgctctccacagggaccactgggggaaggatttggagcttttgtggctgcttgctggttgtgggactctggtaaattctcagggagaaagggggaggtgctcacaagctgcctgctgcccgccccctccccccctcccccacagccaagcacagtagcaacaacacagtctccccagctccttcctgcacatgcattttttatctcgaacgcaagtttccatccaggaagccccttcaggaaggcaagcaagttattcccaccctgggcagagcccagtatggtgcggagccctgaggtaattgaatccaccactcacctgccacaccccccaggctcttctgatactgagttgtattgagctggatggtgcacagtgtgctatgtccacctggctcattgtgggtttttccccctttgcatatgtatgtggtatgtgcttgtggtgtgtttgtatgtgtgcacgtgcatgcacacacacacacacacacgcatttggatatgagtgagtcataatgggggtgggtgttcacaggttgtgtctgtgtgtggaatttgactttcagggtcttccccacttgctctgtgccttacttactagtcagggtccctggctgaatccgcaggtcaccaagtctagctagtctagctaagtatttgtcctagggtctacctggcttggcctcctgggtgctgggtttagaggaggccaccacgcctgcctggatctttggtggtttctgatgattcaacctctgatcctcacacccgtaggagaaatactacggactggtaccctgggcacacaggattgcccgataagaactttctaacttctgtgacaccacctgtcttgcttccatccgccacccctatagctgctccatcaatatcatctaatagatttcacagcagtgcctccctgaccttctccgctggaagcattttaaacagaacatattaacttacaaattgagcactgctgctctaatatggtttgagccaagtgaactttccaaggggtcagaagaaaggttggctgctctgtagaagtgtagggccgggatccccagcacacagggagagctgcctgtcagatttccatcatgatgacccaaaaggcagtggaaagtaactcgcatttcatagcgctcccagaaatcaataacacttttggttttcagagggggaaaaatccgaggtgtgtagcttctgcagtcgaaacgcttggtgtaattagaagcatatctcttctgctgctgtctgcttcagcaactttctaatcaggtagaaggagagggaaagaacggagtcatcaaaagccagcagaggtcccgtgtgagtgacgctgactaggtgtttggctcttgccattggcatggctcaaaatggctcaaaagccatgaaaggctggagaaggaatgatatgtagctatgtgcgtgtgcgtgtgtgtgtgtgtgtgtgtgtgtgtgtgtgtgcatgtgtgtgtgtgcatgtcacttgcagtataaaatatagaccatgggctaggaagatagttcagtgggtcaggcgagggccagctgggcatactggcacacacccgaagccccaacacttgggaagcaaacagagaaagaccccagggtctggttgcacttgccagccagtgccgccaaattagtgagagcccgtgcttcaacaataaagcaagggagtagagaatgaggaggaaagtaaaactcttgctgcctaaggctgacatccagagttcagacccctcagactcaggagctgagcatctctgacctcagtacacctttactaggagatgagaggcagaggcagaagagttggctggtggcattcaagcaacactgaacaacagaccctgtctcagaaaaggtggggggcaatgactgccacccaaattatgttcttacttccatacatgtgccatggtaatacctacacagattcctacacgctcacactcatacatgcacatacactataatatattatatatttttatataatatactatatatgtgtgtgtatatatacacacacatatatttatccacacaaatgtaatagattacagttctgttcccaagcaaacctatgtagattagcagactccctctatccattttaaaaaacacatccattaagacgcagatgttgatttttctatcaagggtccaaagatgaattatacaataaatcaacacttggactgtaccaatgtttcccctttctcctgcttttacttcccttatcatttttcttttcataacaggtatgtttgtgctatcatgattcattctggtctcagaacattaccttgtaatgaaggagaaatattttatattttaaaagaaatgagaaaaaaacatttggttatccacatttcgagaacattagcaaagctcctaagtgctcacttgggctttgaaaggttttctaaagtaaggattataaatgaacacccgtttgcaaagctctgttctgatcccctcttgggaaattctcacagtggcattagatgacactgcacaaaagctttgtttccccaaccccagagatgctctaacctcaggctctccttccaaacagcacgatactccagatccttccagcattacccaaactactaaaagccaagcagagtacatacaggctagtctgttgtgtgggggcttaatgtgctctcttggagtttgcaggaatggagtggctcactcactgggaggacactggaccagcatcccttatcctgcctctggaccagcatcccttatcctgcctctgtttttccactcattacctgatttcatttaccatctattaatagacacagagagcacgtaccacccattctacagaggaaaataaatggaagctcagagagagggctgtcttccccctggatcatgtagctagaaaatgctgggaaaaaatggaatgtaaaaatcactcagctcaccccctccagactagggcctcactgcaatgctctgccagctctagaatttgctattcttttttccattctgcatatatcaagcctggtggaaacagctctcaggttttctctgtaacttgtatatgaaataaaaagaaaacagatgtcatctctcttacacttacatgacaggtggctgtgcagtggccactggaaattttttattgcagtgtacaataagaaatctgatacacacacacacacacacacacacacacacacacaggccactgcattgattttctgatccactaatcatttgtgttctacagtttaaagaatgatgaatttcagtagtgttgacatctgtctgatttgactgacatcccttttagaaagtgctcccccaagacttcgaaatcatcaggatttgggttgtgaatatacctagctatgagtcaaacacgggtgtgagcaggaggcctgagcctaagcacagagctcagtgtatggagtgggcatctgtaccctgcaccgaccttgtatgagagtagttactcttcagcttgcccttcagctgccagtaggagacccacaggaatggtgaactcacctaactcactgtggctttcgctttgctcttttgatttatagatgtgttgcctaggaactctataaagaactgtgtctatgttgtcttttttgtatctctgtcatcatatccaagtgccatacctggcacagaaacaaggagaacataaaggaataacaggaccagacactgctggacatgttacagtgctccataccacgccaaggcagcctccgtttttaaccccatgcctgccttcggacctggcccctctccctgtctcgagaatttaagggcacagaggtctgagcactgctgtgaaatgtgatttgtgttttatttccaatgagccagaagttaagggatcttgtatttttagagagaccttgggcttttaaagcatttgaatttttagagactgggacttttaaagttctattctatactgtaatattaatgtgagatcctggggacaagcaagaaaggaaagattgtagtttaacggtgaatatgtttatgtatcaagctgacaggagtagaatctcccagtaaggttttattgtcaatttgattcaagcttatggtcacctaggaaaagggaagctcaattgaagaatttcttggatcatattgacctgtgctcatgtctatgagagattatttttcattgattgatgtgggaggacatagtccactgtggggagcaccatccttagttaagtgggtctgggctgtataagaaaggtagatgggggttggagagatggctcagtgcttaagagcactggattcctcaagagggtccaggttcaattcccagcacccacaaccatctgtaatttcattcttagtagatctagcgccctctgttgggctctgggggcagtgcacagatgtagtaaatagacctgtagacaacggcactcatacacataaaaaacgaaaatgaagccagctgagcataagcctgcatgctagctagtaaatagaatccctctatgatttctgtttcaaattcctaccttgagttgttgcactgacttccctgatagactgtgagacctgaaaatataagatgaaataaacacttcctcccctcagccacttttggttggtgtgtttcatcatagcagcagaaaggaaactagaagggagattggtaccaagagtgtgtatgctctgcatcttgccttcccaaagcacagccccttagtgccttgctcagagactccaggccacgcaggagccagactgtacagcctttcttcccatgcttagttagacatatccctatggggcagagacctggcgatctctctggtggccttgccctgtgtaaccagatgcattgaacaatgttgcagagaacttgaggcattaacctggtaccagatgtgccaataagcagagatgcagcttagcccaaggctggcgtggagagtgggttacacagagaacagttaggaagcctgtgtgtcgacctgacacaaggtagggtcatccaggaaaaagcaatcttagtcaagaaagtgctgctgtagagttggcctgtagacaagtctgtagacgagacattttctggactgatggttgatgtctgaggggcagcccattggaagcagctctacccctaggggctggggtccatcaggaaacaagccttaggagcaatccagcaagcagcacccctccatggcctctgcttcagttcccgactccaggcccaccctccttgactgtctttgttgacggcctgtgatgtgaatgaggtaaaccctttccttcttgggctgctaatggtcttgggttttctgttcagttgtttgttttttgatcacatcaatagaaaccctaacggagatgggagacttcaagcatgccactttattcatatcttataacgaatcctttgacagtctcatgttttcatcatattctcctccactgccctttcttatccatctcctgctccgtccagacaatgtcttcccagaattgtctccctctacttctgttgctatgacttgctttgtgatgccctgagttttttttcagggtcacttgtatgaatgtgggcagggggttattgatgtactagaacatggtgacttagcaatggctccaccactaaggagcaatgatcgttcatcaagtcagcagtggnnnnnnnnnnnnnnnnnnnncctcaccaccctacccatcacctctctggaataactggagtgacgttctgctgtctctcatctccagggttgtgtctgggaagtacatccttgtcctgctcaatcgtgggctcttacctgccacaccagctactgagtgtctcgcctccgaacgaatcttacatttagttaccattcacttcgtgtgatcttcttactttttcacttgcttgcttcatttatttacttatttacttattctgcatatgtgcttgaacatatccctgtataccacagtgacattagtaggctcctccctagggcctataatttcccaagccacaggcttttgaccaggctcacagtacctggtgtgattctgtcctgtggagtggacttcaaatccagtaagaaagagttgactaccccagtaatactcactcattctactgttttaccaattggcgcatcttgcttggcaggttggtatcataacacgcggggtccactggtagagtttcctcccttgtggcctatgcaacagcactaaaaaatgctaagctagctggcagggaagaagctctattaagaattggggagggggcaggggtaagtttagaaagagacacatagaacttgtatagtgttagtcccttataaaggccatgaaggaatgctcaagagtatttgtgaaagatttgctgcccttgtgatgtgctcgagatgtttaatgaagtgtgaacattctggtgtatcggaaactgcaagaaacaaacaacacaagaactcagccgtagcccagaatgacctggaattaacggtaacagccggcgtgtaggttgtaatatgtgcatccacctgctagcgggcagccagtaattcttgcatttaatgagctcctgtctcctgtctgaaaggcatatgcatttcattccgccaggttaccaggagaagcagatgcatgtgaatctacactaaggtcagatggatacctctgtccctggcattataaattggaccttttcggacagggaaaatgtggcatgccattgtggcagaggcccagatcatcttgcttgagattgcaaaactgccagaggcagtgtagctgggatgagctcttaccttgaatatcgtcagaatgagaggagttgtctctgggcagagtggccccagagctacatagagctcacatcctgcctttcagaagagaatacagaagtacgatcctcacagaacacagccgcatgcaggagcctgggctcagacacttttgtcccctgaaattctgactaagcggtctttagctcctagaagaatagcaccgaatagcctgagggtgtgactcaggcagtagaatgattgcctactgtgcacaaagctctgcgttcaaccccagcatagcaaagtcaggtgtgtggtgcaagccttcagaagcaggaggaccagacagtcaaggtcatccttggatacatagtaagttcgaggctagcctaggctaaatgagagactgtctcaaaaacagacagacaactaaacaccaacagtaggaattatgtataccccagctcccaccaggagaactggccttggtcttgaggataaagatagaagaaatgatgacattttatcctgttaatacctctaatttcatggcttctctgtgacagatggggttgtgttatcttaataatacaaccaggcaagttagaatataaaaatcacgttggacagtgagctgtaatttcattctatgctgaattcagccagagcttctgcatcgcccgaggcccctcgtactgtcaagctgagtgacaggtctcacaggagaagataagcaggacgcagaggccagccttcttccagaggccggaggcctatgccctcccgatcacaaagcctcacgactttctcctccacagtgttactcaaacatttggtggctcagcttataccccagtggtgcagattcatagcagcccaggttcccttcattttttaaagaattaaaaaaaaaaattatgtgtgtatgtgtgggtaggtgggtctgtgcatgagaccagaagagggcactgttccagacatttgtgatctaaccgctatggatgctgagaactgaactcaggccttctgcactgagcactgttacccatctctccagcccaaagtttcttttaattaacctctgctcttccatccttccctccttccctccctcccttccttcctgccttccttctttcctttttccttttcccattgctgtgaccaagcagtgacttaaggaaggtctgttaggctcatggtttgggggggatacagcccatcatggcaggggagtggctctcacatgtggttgaaggagccgagtctgcttgttcacatcttggcagagcaggaaacagagggacagggaagcagggctgccctgtaaacctctaacagtccctagtcagccacttccttcattcaaggaggtgatgcttagtgacgtccagcatttaccagagggtgtcccaaatgagttttgaatgatcttaatttgtctgacttataggctatatggctgtattgagggtgtgggctgcagggagtatctgacctgttgtcctcatcaaagatcttgcagggagcagttgatgtgtttcctcagaaaggaaggaggtagtttgtggtgtggggcttttctcttgttagtggttaggctctaactagaggcagagtgcaagactgtgggaggaagcacaggggtggggggggatgagtgggggaggggcaggaggagggccaggggaggagccaaagggggaaaaggaaggtccaagtgagggtggaaagaaagcagagaaaaggagaaaggaaacagaaagagaggaaggaagaaaggagggagggatagagtgaaaaataattgggacaaaggtccttggtgggcagtaacctcatggcacagttcttggaacggtgacccctagggttctccttactaatgctgtgaccctttaaggcagctcctcatgttgtgatgaccccctccccccgtaacattacttttgttgctactctataactatagttttgctactgttatgaatcataatgtaaatatctgatatgcaggatatctgatgttcgacccctgtgaaaagattgtttgaccccaaaggggtcacaacccactaattgagagctgccctagaagctcctaaatctacattttctctccagagctcccagaatctgtaggtttgaggtggggctagatggctgtgtttcatgccacctccagaggcccagagtagaatgatatcattccagggaactaactggcaagccctgactggcagctcttaggggaatctctgaatctagaggactgacccaagctccccgaggaagccatagctctggcccactgttgctgatctgtgactccagagagatggtgctacctagaggagccatcactgtcttcaggaaacccagtggtgaggtatcctaagttacagctcacagctttggaaagaaaggcagaggcaggggaggcgtgagcacatctgaaggagacttccattgaggatggccgctgaacttgtttttatgtctttagctctttgggagaagtgaccaaggacagactgggctctttgtgcacccttgttccctgggtccaatctgccttcctgttgagaagattagaaatatcactttcttacaagagatggagaacactacaaaaaggctcagaagagggatcgagggagatggctcagtcagtaaagtgccctctgggcaagcaggaggacttgagtttaagctctgggatgaacagttttgaaacgccattgtggggatatgacacttataatcccagcactggggaggtagaggcaggtggattactggctagtcaacctagcctacttggtgagttccaggtccagtgaaagaccatgtttcagaagacaagatggaggccatatgagctctctctctccccccccttactcccccgcccccccaacacacagtgacagccagactacagctcctaatcttccctaaatagacacctactggggaccaagtattcccatgccagagactcccattcaaaccaccacactgtcctaccagcctgcttcctttatagacaatgttactacattgatagatccaagtacttacattccttctgggaacgtgaatttccttccttccttccttccttccttccttccttccttccttccttcactcactaattcatctataagccctgtagataagatgaagtagaggttgggtggcaaacatttaggtgaacccccatgttgaactacatcaagcttgagaaatccacagttgaaagctgactccaactgcaacatcaggcatccatttttggcctgtgattcagcagaaatggagacaacctgatgatcgtgagggttgaaatggaggtgggaggtgtctatcatcaataccacccagagtcagaagtcaaaaacaaattacttggttagattgatggtcgaaacagagaagtgcactgtggcgggggtaacatgaaatgtcacagttagatgtagtggtgtcactggggatggggagacctccctggatcatagtcgacttctatggtgtgagctcttcctgatgagacacaaagcaacatctgcctacccgctatagcatgccaacaacaacaaaagaccaaagtaatgattcaaccccagcctgtcttggggagttgatgcattgactgggtttactgacagaacatgggtgaggggtgccctccaggatcatatggctatatcacccagaactctccccctgccataggtgacaagtcccctatgctgtggggtactctgcagccttcagttacccttcaacactttatatgaggcacctcccatgacccaggaccgcatgcagctcgggcagagtcgtgtgtagctgggagggggatgcaggaggaagtggatggatcgcagatgagaggtgatgcacttctcaccaccctctgcaagggaagccagcaagctgcaagggaagccagcaagcccaggctagagggtctcttgggggtagcagcttctctggtaaagacaccaggatccttatgctcagaggatggcatcccattgctgaatcaagagcttgggagttgtagacctaaggagacctttgacattgaccttaacctcccttcaaaaaggacaagcttgttggtcagctgatcgccatgtcatgccaccctggtggctcaatggtgcctgatggagtgtggaagtcacctcctggtgaccggccacagggatggcaagaaaaccaggtcctcagaggggacctagaatgagcagggctcatgagaaaaggcctagcttggcagccctaggctagaggtttaagattgggaaatagtctcattgctgtgtgtacctgtcaggagcaagtacccaggagatggagtagggccaacaggtttctgtagcaagaaaaaaacctgttaggatgtgcagcagagaaagtaaactggacaatgcagtgtacacctgtaatcccagcactcaggaggtggaggcaggaggatcaaggccagtggggctatgtaagacctatctcccctgcctcccctgccccctccaaattacagtgtattgcagaagaacaaagtggcttatgtggtaagaaagctaagctggagatgctgagcagggctgctatgagcccctggatgagaacttagggtggagtaggagtttctgtagtgccttctttttcttctccagtctgcaaaattctttgggcatccttggcaaggcttatgcctctggctctgaaggtgcacaggagtagcattcttcttcatcatcgtcatcatcatcaggttttttgagacagggtttctctgtgtagtcctagctgtcctggaactcaatctatataccaggctggcctcgaactcacagatatctgcctttctctgcctcccaagtactaggattaaaggtatgagccaccaccacccagctcaggagcaagcattatgtaccagaatgtggttattgtcactttgtgggacagcatgatgctacaatgcttagtgaagtctatgttggagctttgttttagagttagcaatttttacttaatggtctctctctgaattgaccccattcacaggatcatctttaaggaagttcctgctgccctttcgtggcagtgttgaccctcccctgtcctaagtatttgcttttcgtcctggactctcagttccataaaggcacatagtggggtgtgtgcatgtgtgcacagggcatgcacacagatgtgcacatagcacacaagcatgcagttcccagacttgaaactgtgtttgttacatgcctaagtctatttggagaattctaacttaccaattggcctagtgggtcttctgatgggatcgatttgtaatcttatctttggtttgggggaagaagagccagctgagcagtttgttacagtactgctcatcacagcaaaccaacagattgtgtgcccctcacccctttttttctatgactactcagggagtgtccatggttaggcctttgactgtaggagcagttgttttgttttgtttcgttttgtttttgcatcctactgtttaaagagtgatggatttcagcagtgttggcatctgtctgatttggctgccacccgtttccaaaaatcttcatttctgagatatacttctaattacaccaaagacacaaatcttttaccgactcacaaaccttttctgttgactcgcctgtaatgcctgcatagagcttgcagatatgactcctccagcttgaagttcagggtagccaaggcaaggtctgcctcatgctatatggcattagcattccgtggcccacatgacccacctgaggcccagtgaaagccattttgccctatctagcttctttctccctcagagaaatcccacctctgatgagagtcacagccacagcctcctcaccacttttccatagctccatcccctcctgatcttgcctttcttctcttaacttccttagctaagccccacccctaccccaccctcacacgacagagcttttcgttgttggatctgcaaatagagacagttacacagaggtgtggctggatgcagtttaatcctgagaacagatccaggcctggccaggtgtgattacttagtgaagcactgtctgagcatacaccagactggcctcaaattcacagagagctacctacctcccaagtgtagggttaaaggcatgcaaccaccctgtccaggtccacacacacacctttttttttcccccagcaaaaatcagaagtttgctttaaggcctgtccttaggagtatagagcttagctgctggtcaatggggagaaaatgtccccagaggccttactttgagtagcaggaggtagcagcttccaacaagaagtctgggaggcggctaggctggaagccagctctgcagaataaggctgtggccctcactcttccaggagctatgagccagcgcctgtcctttctccagatggaccagggtgaaatcaccacattaatgaagacctctccagctgaaactattgtttcctttgaaaacactgcctggaaggacttactggctacagctcttttcttgtctctcttttgggggggggtatttctgttccattgtcctcaagtatatgagtcacttctaatgacagtcattaggagaaaaggaagcaagggatctaggaacacaagaggcctgagaagaatggctaatgttttaatagagctccgggtgacaacaggcatccaaccaggactggggatagagaggcagaggcagaggcagagtgtgggatgccatagctccataggcaggtcgctcaggtgaaaggattgtttcaccaaatcatttcttattttcctatgactcaagactttgtgtgagaggagagaaggtgtagctgtgaggcttctctaggggaacggaatcaacagaacgaatgtatgttgcaaagggcatttatcagatacgggctggtgatccaacaaggtttgtctgcatgctgaagaggctcagaacccactagctactcctgactctgaaggcctgggagactccggaagaacatctggtctctagtccctgttggaaggatgaagaaactgaattctgatgttggcaaaggttggttggagcatcagtggagaagctgcagagtatatgcagtgatcagcaaaaagggaaagcaggcaggcaaaatcagcagcccttccctcacacgtgtttagatctgggtggcttccagaaggtatctaccctggaagaggatcttccttcatcttgttaattcttcagggaaatgtgctcacagatccacccagaggtgtgtttcttagttcatcccaaatatggccaagttgacaacccaaattaacttttacagacaagaagcagcttccttgttgacccactcaggtgaggttgtccctagtgtttggtgctctgagactccctaaggcttagagaggagctggctgtggatgaagggcaggatctccaccctgcaggggtcaaagcgaaggtgcagaagccattgcgaaacttcaggaaacgactctcacttaagtgatgcagaatgcatttattgaacatctgttccttggcttatttccgagaggtgaacatgtgacaggaaagcatgccggaactgcacaggcagtaattggggctgatggaatgctagagcagagtcacccagactgccttggagactgcggcagagggcgtctgcttcccatcgctgtgacagagcactgtgagaagccagcggggaacatattggtgtggactgtgcagtggagcagaaccgttaacctccttacggcagcccggaaggaaggaaggaaggaaggaaggaaggaaggaaggaaggaaggaaggaagaggccagtgagataagaaaggggagatccaagaacagcctcaaggacccatccctcctcctagtgttaccagcctggcagaactacattccaaagacaccctttagcacatgtgctttcaggagaccccagaggaaaactcacagaggtctccaagagggggacaaaagaaacctcagtcacttcccagcagcccgattcctccttctcacccgttctccttccttcttctcccttttcttttttcttttgacacataccaaccttgtttcatttttgttttgttttcattgtgtatgtacatgtgtacatgtgtttgtgcctatgtgcatgcatgtccatgtatgtatgtatgtatgtatgtgcatgtgtacatgtgtgggggcatgtgtctgcatgtgtgcttgtgtgcatgtatgcatatgtttatatgtgtgcatgtgtgtatacttgtgcatatgtgcttgtgtgtatgtgcgcatgtgtgtgtgcatatgtgtgcatatgcctgcatgtgtacatgtgtatatctatgtgtgcatgtgtgtgcatgcatgtgtatatatgtgtgtgctgcatatgtgtgcatgtatatgtgtgttgcatatgtgtacatgtttttacatgcacatggacacagaggcccaaagctgatgtcaggaaccatcccccatcaccctctcattttatttactgaggcaggacctctcaataaaatccagaattcaccaatagagctagcctgttagctctgggaaatcctgtctctgccttccaaggctggaatacaggcaggctgccaagccttgcatttatgtgagtgcttagaatccaaacactttagccaccgagccatctccccagccccatgttgtccctgtttctgttgctgcatacagagcagcaccaaatggagaggtttgaagcactaacattgtgttgtatgccttgatttttctgggtcaagaatcaaaagagctatggacagatagctcctagtattagaggttgggggcagttgggagtggctgtgttggcagtggccaggaatgctccctagggactttctacagtagcaccttctacagtagcagctactccagcacagggtctgtgaccttcacacatcgctctatccagactcccagaaaggatgtgccacaatcctatcaccatcatggacatgaatctcttctctggggggcagaggcgatgattcagttcctgtccaagcatgaggacccaagctagccaaaacacccaaccagtcttggcagctcatgcttgtaatccaagttggaagagagagagagttagtcctcctgtgcttagggaacagtcagcctagcctgcctggctactccagaccaatgagagaccctgcctcaaaacacaaagtgtacaacacctgaggatcaacgtctgagcttgaacctatgccttcaaatgcacacagacacacatacacacagacacacagacacacacacacacagagagagagagagagagagagaatactcagtgtttttatacttactgatacatttgagataactagtggtataatttccctcagtggtattccgtgtcacatttttttgacacacattttcaatctactgttgctacagaggttgatacagggcagtcacgtgatctcagcttcctactcctgcaccttttcattcatacatccaaccatccctgtcctcagcagacacgtgtcttctctcctagtttctctttgatggactaccaagtagaggaaggaattaattcaatatgaagtcttctgaactggcttctttccagtaaagcaatgcatgcaatttattgtttgtttggggacagcgtcccatgtaacctttctacagagcagcggcttccttgaactcttgattctgtttcttccctcttccaagtgctgggattacagtacagtgtatttgggggtcacatgtgatcatgtgttaaggcagttggttttccaaattgctggacagtatttcgccctgtgtgtattggttgttcttcctgttgctgtgacaagaaaacactctgagaaaggcaacttaaagttgacttttgctcacagtctgagggagccctccgttactgtgggggaggcatggcagcaggagtgtaaggcacttggtcacactgcgtgcatagacaggaagcagagagaggtgggttctgttgctcagcttgctttctcttttgtttatccagccctggatccctgggatggtgctgaagttggggtgtcccacatctgttaacccagtctaggaaccctctcacagatttgctcagagttacctttcccaggtgatgtagaccctatccacttgagaatcagtagtgactgtcaccccaggggtacagtaccatctgtccccgctccaccagtggacttggggtagggaggccactgaagctgccatgctctgcacccagccttgttcatctcacagaaggacctcagagcaccatccctgcatgctgtcacctagtccagtggcacacgtttctagtagtctgagagtaataggcttgctattaagcccgtgtgggatccgtaggcatgaggcacttctgggagttctccttatattttgatggcagcgtccaggatttgtagaatcatgtgtgctgttctgaacaccagttggtacttgcatgactcatttctagaaccctctgtggcattgacagtgtattcgtttgtcccccagggtcacctgctttaattactctagacttatgctttctttaattgtgtaataacatttatccagtttttcttctttgagatggctttggctattctagttccttttgtttttccctgtaaattgaaatctcctttccggttgataaagagtatctggctgtgtgtttgatggactcaggttaactttggtccccttacctgcctgatcttccagtttatcagtaattctcccacaatgtatttaagtggctttgtaactttcagattatagatctgacacactgacaggtttgtatctactttgtgttttcgttgctactttaaatgtgtgtgtgtgtgtgtgtgtgtgtgtgtgtgtgtgnnnnnnnnnnnnnnnnnnnnccaccttaggtattatcccacagcacacaggactcctttgtggttttgagtctctcactggcgaggagcttactggtctggtgagggtgattggctagtgcttcccagaggtcctcctaccctctcagtgtgggtgctggagatctgacctggggctcttgtgctttgtacagcaagcactttaccaaatgagccatctcccactaatttttaaacttcaatttctaattattgatcacttgtgtttataaacagaattgatttgtgagctttggccttgcagcctgtaatctcgatagcctctcttgggtctacaagctttcctggagttgacgtggattctctaggtagacagtcctattgcacctcccttgtctgtttgtctcctcccttcttcttgtttacactggtctggacttgcagagtagaaaagccgcaccaatgtctttcctcctccctttcttgtccctgatctcagggcagcatctttcaggcgctcatctcaaatgagatcgcagccgcaggcgcgttatagatgccctttatcaagtttaccaggttcttttaaatttctacttggtggaaaggtgtcttttttttttatttaatcatgattagatcttaaaatttatcaaatgcttttcctaaccctattaagattgggttttcttcattctgtcagcttggtacatttctgtgattgatagtcaaatattggaccactgctgtgtttattagataaatcccaccagataaggatgcattaccattgtggtatattgccgaatctgatcttttaggtttttttcttgattgtgttttgaacttgtatccataagggatcattgtctgtgggtctttttccttgtctgtaatgttatttacttatttatttgggtgtctgggtaatgattccaagttgtttaatttttcctcaaatgcccagtgtagttcttctgtgagaagccgacacatcttctgtttgcccctctgtgtgtgaagcatacctgtttctccacctgaagctcctgaagagtccgccttaattgccttagtaaattaagcagctagcccagctgctcatcggccagtccctccctcatcaccctttccccctccttcctctcccctccattctctttcccatcccctttccttgcccccacttctctcttctctcttttcatttttacacacacacacacacctccttgtctcaatgaacgacaaggtgtttttccttctatttccgaatgtgcggccaccagatctatctcttcacgtctgtgggctatagagagtcacaatcctcttgtttgccacgctttcttcactcagtggctctgacattccctccaacaggctacatcccagaaacagccatcctcgggactatattcaatccacaacgttcacaaggtactgcaagggaaattgatcagtttccttatgttgtatagaggaagcacgtggggaagccatggtcgtgggtgatggcggatggccaggaaacagggtctggaagagccacctgagagactcgatggattctgattctctcatgtctgcaagaaatgagacaacaaagatctgtgctcatgaagttgtttgtgtttgtttgtttgagggtcttatctgacctagactactatatagctgtgcatgatccccctgtctctttttccccagagctgagaatacaggcctgtgtctcctcatccggcttatgtggtactagatatgaacccagggcttcaagcaaactaggcagtgctctacccactgagcaacatccccagctctaggctgacattcctaacatgaccatgcaccctgggctttgtagcaggagatgcttatgtgtaatataattacatcatgccccctttccctctctccctccaaaccctcctacatgctcctccttgctctcttgcacacttgcggccctcccccctttttttattcactcttgttaagttctgttcatatatattccaaggtacataaatgcagcctgctcagtgtgtgtagtgttacttgtgtgtatgttctgggggttgaccatttggtattgaataaccagttggtgttgtcttcccagggaaagattgtgtctcccagtcgcagcctcctttagttgccggtagctctttgtgtataaatgaacagtaatacacataaggaggagtgtgatggctttgaaccagtgaacaagcactgaccaccattcttctgtggcttttgcctccagtccttacctgagttactgccctcagtgacaaactatgacccgaaagtaaggccacataaaccattccctctacatagtttcttgggtagtgggacagtagctcattgtacttgccttaagaatcacaaagtcctgagtgtgaccccccccccagagccagccatggttgtgcatgcttataatcccaatgttggggagacagaaaggtagattccccagggcccactggttggccagtttaggctgattggaaagctccaggtccccttaaatatcatctctgggaacctgcatcaaacaacaacaagtaatagaaggggctggaactatggcttagtggttaagagcacttcttgttcttgcagaggaccagggtttggttccaagtacccagatggcagctcataaccattcataactccagttccaatgaatccaacaccctctctggtctccctgggttccaggaacacatgcggcacatagacatacatgcagacaaaacatctatacacataaagtaaaaataaatacatcttatttttaaaatgtggaatgcaaacagacatgcacatacatagaagagtctattttcctttttgttgatatgataaacaccatgacccaaaacaaccttgaagaagaaagggtttgcttgacttgacttccaggtcacactcggtcactgaggggagtaattcagggcagggcccggaggcaaaacccacagaggaatgctgctcagaagctcatgctcagctagctttcttatactacaaaatcaaggttcactcgcctaggaatggtgctgcccacggtgggcttggccctcctacatccatcatcagtcaggacagttccccacagaccaatcaaatctagatagttcttcagttgagtttctcccttcccaggagtgtcagggaacaataaaagctaactgggaaggagaaggggatctcagaacaaaataggaagtggaagaccattctatattcttggctgtgttgatttgaggtggcaatagaggtaattgaggaaacaattgagaaagatttagtgtactgtccatctcagatctgtaggatgggacttggtctagtacagctcttgcctctgtcttcaggaagcaacttccccacagaaatagaccaattctccttcattgtcacatggagattagtttgggtgacactcacctcccttccatctgctctgtgattactcttgagtcctgaatggtgactgaggtttctcttttgtctcttctccccatggggcctcctggcatttgtgctgctgccttccacctccatatgggaacagtgcccactgcacctccccagaacgtgcaggcagaggctgtgaattccaccactgtgcacttcctgtggaacccgccaccccagcagttcatcaacggcatcaaccagggatacaaggtacctggcctggttttggaacctccaaagggcattcatgggtagtattaatcatatcatactctgggtctcacccttcctatgtggtcataaacccagggcatcaaacacagagtactgcaaacttggcagggctgccatctgtcctcattcttttcagatattccaggccagaaagttgaatgctcagctgataagacggcacaagaaaacagcctctagtcagagtaatgggcttcagggaaggctgggagatgggacagccagtaaagtgcttgccatacaagcacaaggacttgggtggtccctctaaacctatacagtgaaaagatatgagcacattaatcccagcactggggaagcagagatgggggaatctcaggtgcttgctggccagccagcctacttgaatcagtaagctgcaagttcagtgagagactctgtctcaaaaactaagatggacaatgattgagggagacactctgggctttacatgcatggacacccgtgggcacacatatacatgcatgccagcatacatgtacacacattaatcacacatacacatacgcacaactgtagcacacatatatacacatgccatcatatatatatgcatacattaattacaccacatgtacagagagaataagagagagagaaagaacatgagaggaagaacatgagagagagagcccaggggagatctatgtgggctctttgagtcagcctgtgtccaagcacttcttcctataacacagaatcaagggcgggaattcatgagaagagactgctgtccagcagaaaccattttactctctgctttgaatatagttctgtttaaagaatagaggccagagagagtccaaggtccaggtcccgatatgaatgaatgaacagaccagcaatagaatctgttgctggataagatgggcttggatgcgcattccagcagcacagtttctttcctttatgtggacttctagttgtactttggagtctgacttcattgtgcacaagtgggttcataagccccttagcaggagtctcagggagtcccttcagagaagggtgatgctttcagcttctaaaagttgttgttgcctgccatttgtgttgagcttgctcaaatgcttgtttgtctgtgataaggcccagctaggaaggtgctatgcctctgcttcttcctcggaggtatctgaaggcagatgcttttttgaagggaactcatactgatcaacccgagactccatcactcttggctctcctgccaggtctgagtggcgagaacactgtgtgcttctgatggctggcttgtcagtttgatctcacggatatgctatgtcctgctgccaattagctttcagaacaactcggtcctggagatgcatcgtgtcaggagactaaaactcactacacatatctagcattaccaaagcaagaaagcagcttttcctggaacttgtacacacacacacacacacacacacacacacacacagatgcatgtatgctatttcttgttttgtttttaagagagaatttcatgtagcagactggctccaaactcagtatgtgcctgagattgaccttgaactcctgactctccagttcctacctccttagtccttggattataagcacatgccaccatattgggtttatgtagtactggggtagaacccagggtttcctgtatgctagctaagctctctaccaactgggctacatctgcagttcctgtatatgccctttatttaaaattctaacttatctcccaaactctattccaggaaactagtataacataaattataaatcattaagattgttcctattgaattcctttgagtcagggtagacttctatctggagaatttttgtgtttgtctcctcatgataattagttgaattaacagatggtgtcatctttgctcctcactattaaaaaaaaaaaatccatgttcaatagtatcctaagagaagatggagatgtaagggggtgtccattactgtaacaagtttagcagccacttcactcatatatatatatatatatatatatatgtgaatatacaaaaaatatataggcatattttagactcaactgttcttaaaattaaaatgggattttaagatgtaataggatttatagtcaggccttactatctcagctgcttgggaggctgagacaggagaaccacaagtccaaggccttgctgggaaacttagtaaaaccttgtctcaagatttaaaaatgcaaaaagtgagtgggaatataggtcagtggtagagcctttgcctagaatcccccagtgaggggctggggtgtggctcagtggtagagcccctgcctagaatcccccagggaggggctggggtgtggctcagtggtacagcctctgactagactcccccagtgaggggctggggtgtagattagaagtagagtgcttgcttaacatgtgtaaagctcttgttttatccccaaatatgaaaaggggggaaaatggtatgacatttatggacttactgaattttgactatactttctttaaagacatactaattgtaaaatacaattttgattgacagctaagtaaagaaatgtggtttaaagggggtcttttttgtaacccttcccttaccagctcctagcatggccggcagatgctcctgagactgtcactgtagtcactattgctcctgacttccatggaatccatcatgggtacataacaaacttgaagaagttcactgcctacttcacatccgtcctgtgttttaccaccccgggggatgggcctccaagttcacctcagctcgtgtggacccatgaggacagtgagtatccctctccttgcgtctgagctatcctctcagggactactgacaagaggaggtcatgaccttcaccttactgggtcacagtgcagccagcaccaggaagccctgtaccccagtgctcttgcagggcagccagacatcccagccagtgtgttcctgaatggcaaaaagggcaggggacccttgcaatgtggaagggactctggggacaacagtggagggagtagtcctattatgttcaaggaggaagtagacctactgtgttcagttctgctgagcttggctgtcattattcagacccttaattctaatcccctcacttttttgcttggttgccagccatgcctgtccacacactttctctgccaccctggggctttgctttggccccacttagtttcctaaaggcccctgtctgctctcaggcaactgttgtgtcaaggacacaatgtctggtgaaagtacctgagggagtaattatagacatacacaagaccataggcaagggcacccctaactgggaacaccggcatatacttatgccagtgctcaggaggctgaggtcagagaactttgaagctttgaggctagcttgggataaagaacaaatcattttctcaaaaaaccacaacaaacaaacctccaaggggcctcatgacaagtcatctacaatgaaaaccagtgaaaagcatttgatgtcccaaatggggacaattgggagagagataaaaaggtcatgcaacagatattttgtagctattttaaaaaaaaaaaaaaaaaccctaatttttaaactcaaaacactagagggaaaattgtcatgatataatgtcaagtgaaaaaaaaaaccagttaacaaaattatttgagatctatgttttaacataacccatttatttattactttgaaacacatttctctatatggtgtgtgtgtgtgtgtgtgtgtgtgtgtgtgtgtgtgtgtgcgtgtgtgtgttgtgttgtgtaggtccagtatctttctcaatcacttcaccttatttttgaaacaggttcttttcatgactctagagctacccacttggctaggctagctgagcagtgagctctgggatccacctgtctctgccctaatagctggaaatcataaatgtatgtgggacagcaactttttaaaagtgaattctgggcatagaacacacaacctgggactggtgctaaagcagttgctaggcaagtgtgaggacctgaggagggatccccagaacccacagacatgctgggtgagtgtggaaacttgctgtgattccagccttagcaggcagagacagaggatccccagatcaagttagatagtaagactagacacacgggcaagccccgggtttgattgagagagcgacctcaatgaataggttagaaaggcattgagaaggattctaagcatcaaccctgggtctccacatacacatgtgcacactcaaacacacacacacacacacacacacacactcacacacacagtcacaaatatagacacactcacaaacacacacattcactgtcacaaacatatacacagtcacaaacacacacattcacatagtcacagacatatacacagtcacaaacacactcacacagtcacaaacatacagacatatacacacacagtcacaaacatacacacagtcacaaatacacacactcacacagtcacaaacatacatcacaaacacacatacactcactagcacacatgcaaatacacactcacaaaaacacactcacacacacaaacatataaacacaggcacatgtgtgtatgatggcccaacacatgcaaacaggcagacaaacattcataaaaccacacatatgtgagaaattggaacactgaaaaagaacataataaaatagaataagaactcaggtcctcaactgacacctctccactacccttgaaccaccatttttagtagataggtggcctctttgtcctttctagaaggatggagctccctcatgaaggtggtatcaagggtagggttgcagttgtctctggggtgcagcttgtttgggctgggaccctggcaattagcctcttctgtgtcacagacataagctctgctagctgtggccttctgtggagcctcagtgagatgggaacacgctgggggagggtcgcagtacagagaaaaagagtatcaattgaaagctagccgcctacagagttagaggacagcacagttgggcaagaatccagaaagcagaaacactgggaatataaaaggagcagtagcttcctcggctaagacatcgatcgcagaagaacaagctgcttcaaaacccgtcaggacgtctttctggatgcttgcggttggggaaggatgacatggtcctgacagcatccggttttaccgtcttccactgagagaagtggcgtttgtcagtgcttcagccccccctgtgaaggctctcctgatctcacctcccgggagtgcagcttccgaggtgtactgtacctgttttaaaattcataacttgtgttagggttttgtcgtagttccacagaggaaggaggtatggagtgttgttggtgtggcagggctgatgggaggcacaaaagagcctatgacctctcctgaaggccaagcgagagccccaacttcatgcagaagcctcagcgagtgtgttcccagcaggtttgcaagggagcctgtggtaaggcaccttgagtaggagggtgctcccctccagaccagagcaggtcctcagctgagaggagtataaggcagtatatggtcttctccaaactcccgttttcctcttgctcctgaaaaatcccttgggagggaagagatgagagactagacttctgggtcaagtgagcaggtactgccctagacactacactacatttctgactcccacagagtccatgatgccataaaagccagagtcctggcccctctcactgaaagactctagtcaagtgatcgtacagagcctaagtccctcactgagggattctaggcaggggctctaccactgagccacgcccccagcccctcactgggggattctaggcaggggctctaccactgagccacgcccccagcccctcactggggaattctaggcaggagctctaccactgagccacacccccaggccctcactgggggattctaggcaggggctctaccactgagccacaccccagtgcctcactgggggattctaggcaggggctctaccactgagccacacccccagcccctccctgggggattctgggtgggttattctactatagaatcacatctcagccccttgatggaggattctaaagaagtgatagtctaccaagcaactgatctttttcaggtctaaccaggcagattattttactggtttggatcagagggaaagacagaagctgtgtctgaaggtcctgtggctacttttctcacctccttgcttgtctgcatggaaccagcaaagtaacacactcaagaagagggagcacgccatgagcacccggcccctagtcctgactgcacagctcctgctgtttctttcctacaggcttctgctggccctgtctcaacacttcctttctgtagctaaagctgtccacacaggtctgatcaaagggctccaggctctcgtgttaacagacctctttatttttaattggtagagccgggagctgtggggcacctgagcttcacggagattttggacacctctctcaaggtcagctggcaggagcccctggagagaaacggcatcattatgggtaagcagccctttccctggaaagggaaaacaggaagtgcaccctaacaagaaggggtggccttcgtgtcaaacaaagctgctaagagtaaacccgggcctcctgggagcagctgacaagtcctcctggctgtatggtgaccataaccctgatggtgggggctccaaggatgtgttgcatatatctttgtgtagacagcagcctcagagctgggagtttatcctctgcttcagacactgcagcattctctttgggcaatgagagtccatcggttttagatgcctttcctcacatattcaggtactgatattctagccatgtgataggtaaggaaactgaggctgggagattctgtattcagcaaacatccctactgtgtgtgtgggggtcagtttctaatgacctcccagtagggcagtaactacagtgctgacatctccactctccaccttctgtcctgagttgcaaggccaggacaaagccctggactcctggctccagatcccatattctgtccctgtcccaccacaccctgagtgagaaacctaaggccaagcaaaggcctagggaggaagagcctcaggctcaaggggtccttggcccctagatctgagtcaagctcagggtaaactgcgcatggctgtcccttgacaataaaccctcccatgtggcagggggtaggggaacagctcactttcagaagacttttttgttgttgttgtttttggtttggttttggttttggtttggtttttggtttttcaagacagggtttctctgtgtagccctcgctgtcctggaactcactctgtagaccaggctgtcctcgaactcagagatccatctgcctctgcctcccaagtgctgagattaaaggcatgtgccacccacatgggcatcatcatcacaggttgatacatcacggggcctccccttcccatgctacgcagtaagtaattccctgatttcctgaaagctgttaaagggaattcgtgttctcccattgagttgtgtctgagaactgagcagacaagccatgctgtggttaagaggcaaggtgttctgtggttgcctgcagactatgctgtgggcctctccttctgtggctgccctgagtgctccctcatgctgtgccacctccacaatatgcaacacgttgcttctcgctctctatgactgactgcatagcaaggactctgagggtgacagccctatgatcacacagctcagaggtggccctggtagccactctcccatctctctgtcattacgtgctgggagtaaagtgcaaactgtgttcttgctctacctgcaaggtccccttttccctaccacagccttcagtaggtttccccaagttccaggccaaagaaacacctagcagcactgtatgtaactcccaacgacttctgtatgtgggtaccaaaaatgtgaaaagaactcatttagtaacaacacaaatgggactggtggctgactccatgaggacctgagttcaattcccagaacctgttttaaaaagccaggtgtggaacatgtacttgtaacccagtgtgggaaagacagacaggcaggtcagcccttagggatctctggccagccaacctagcttaattggctagatcgtggccactgagagaccttcttctggccaccagatgcacacagctgcatgaacatctgcatacacatttaacacatacaaagttgaagagaagcacgtgtgtcttgtggtctgaccacttcctgggcaccaccaagctgctctgacaacggattcccactgggttcggccatcttgcttcctcccctcagagtttgcccatgtcctctgtcttttcatagccacagccttgcccaagataagatacatccaactgtacagtgctccatgatcttgaaacaactttcttgtgaaactggctctgtggtaaggttggccaaggaacatcccagactgtcactgcaacagggtcacctccactgagttctcagcagtggtcctggcaaccagccaacacactactcatgataggggacacatctgtgtcccccagcccccccacacacacacagttcagagacccttggaactaaccctcctcacatcccagccattgactaagccacatgcacatgtctacctgactctgcctgtcctaggcagtgtgctccctccagaaccagagatggctgctactggggtgagacatcagagcccagatctgctgtagatggtgcttctccatacaggagagcaaatacagagcatggaaataagaatgctttccaaagcctggaggtaaacccgggggtagggggggatagatggggactccgtcggcagcagagacctgatgtgggtcagtatagctttatgtcaaaggcaaaaacaaataggaacagagagatgatgatggtgcatctgtgtaataggagctctgtgggaagtgtgtgtgtggtgtgcgcttgcatgccgcacacgcatgtatatgtagtgtgcatgtgcacatacgtggatgtgtggatgagtagaaagtgtgtatgtgtgtatatatggatgtgtgagaaagagactctgttcatgtgtatacagatgtgtgtgcatattgtatgtgtggagggcagaaaacttcctcagttcgctttgctcaagcacaatccaccctgcttttttaaaaacaggtctctgattgacttggagccgacccaacactaggtttataaacagataccacactttttacatgggtcctggggactgaactcaaacctcaagcactttactgaccaagccatctctacagctccagaaaggacatctgtctagctcaggtccccaggactcatccggggactgaatcagagccttacgcatcactgattctgaaaacagggctaaagagtgagagaagcaggcagtcccacctgtcccaggcatctacagtgttctagaaactggccaagactctttggtaggcatcttaactcagaagggcttccccatgccagatccacacccccacctctcctgacctccctcacccctcctaaattgtccacccccttccttcttgttttatagcctggggaggagaccagtggagcctcgccaacattccatggccgaacgctagttgccaggaccgccaatttatgatcatctgctctcgccagctaatggaacctaatgaactcattttcatactttatttaaacaaatacctgtagtggagagcggctggctagtgtttatgatggagcttgaccctcagagcttagatgtttcccagttggattctgctggcctgcttccactgtggcctcggctgagtgaacaggctgcccccactgttagtcagagcttcgggaagactctgcccttcctatcaggaccagagtgtcccacttctcactgtctggcctgtgcttctcttcactcctgctcactctgtgaaaacctgtgtacactcgatgtctgctcttctgagaagccgtgtacagggaaagctctcccagattaagagcaaacaagtgtcattagctggatgccatcagaccctcattttcccccgggtcacctgcatccagtgctactcactctgctccatgccctgcctgttggtagacaccaccccccaaatcatgagtcttccctagaacaggcctgtagccctgaaaaggttaacattgtggtggaggagatggtccagtcagtaaagggcatgcgtgtgaacctgagtccccagaggccatgtgaaaagtcaggtgtacagagtagacatctcatagaaaaagggaactctcgattcaataagacatgctgtctcaaaacttaagatagaagcgtgcacacacacacacaggaaaaagaagaaaaactgcttgcaggcaaacctagccttctgagcttaggtcagagaatgctagcatgtacctcccctccttcaaagacacatgtgtataaaactacccgctgttgaaaggtagcttccggagacacttgcagctgaaggttcgtttgtgggcaatgtgacctttatggtggggtgactgtcggaaatgatgctttatcagcctgaccctcagtgaccaccctcgttccccgcttccattttattttgtggtcagaataagagggaagcttcgagcaagggcggcagagcacctgccggagtaaattgcccattgtgcccttgttgtaaattgcagcatctcccactctccccctgtaaactctgatttatgagggccgcgatgcagacagacagtctgtgattggatgcactactctcttgtagagaatttactccagatcaacataaaattttttctgaagctcccgtggtcgttagtctcagttagcgaggccattcctagcaggtaggaagcacagttggaggtggctgggaatgctggctctgggcaactccttgctctgctccctcctgcctgccacaagatgcacgtaaagatgaagtacttgctggccagagctgcccgcatccaccacacacgtctccgtctccacagctgtgtgtgtaaaggggggtgggaggcatccttgcacaccaaatgcctactgctctgccctgtggcaatatcctactgttttgttcatcagatgttctcagatctctgttgacactaatcttatgccctccagagcaggccgtgtgtgtgtgtgtgtgtgtgtgtgtgtgtatgtgtgtgtgtgtgtgtacttggggtggggaagaggcacatgtgtgcagatgtgggtaccagataaaaagccataagtcaacctcaggcattgaccaatccccaactattgtgcatcttgattttgagatttggccaggtacactctccacttaggcaaggctggcggccattgtgctgagagatatggctgtctgcatctccacagcatcggcattacaagcataagccaccacacctggcttcttaaatgtgcattctggggatcaaacttaggtcatggtgctttcaaggcaagcccttcatcaactgagccccctccccagcccgagagcaagctcttcagttgtccactcagtgtccatttgtctccataatgagttgagcatacagtgtgatccatttggactctagcagatgccggtagagctgtgcttactgaagacactgaaattgctgtgttttggctccaggttgacatgatgaacaagatgctgtgtttggtaaattttgctaaagaacagcttttaaacaaatagaatttcctggcagacaaggtggctgcgttcaacaaagacttctcttctcgggccttcagagtgactcagaaacccatgctgtttagaggttaatcagacaaaacctaccagagccagacaaacagagaagatggccctggagcagggctgctagtttctagcaaaaacctggggctcccttctttttcttctttgtgaagtaaagataacagtatctcactgtcaagcgtgtgtcctgtgggttgcatgacttagcccaggtgaaatgcttggcaaatactttgagacaaactcccctccttttgcctcagccacactgagccttggatctccctactccacataggatcacatgtcctcttgggttctagtgtctatcctccctcctcacaacactactgtaggatgcccttatgctgatcttcccttggaatagtgtcagccattgcacactgagaaaactagacatagtggcacacaattttaatcctagcactagggaggcagagttaagttaatctctatgagttcgaggccaggcagagacagagtgggaccttacccctccccccacatacacacaccaaaataaaataaaataaaacaagaaaaagtagaagcactattgcatcttagttgcaaccctagaaccacacactgtctgatgctatgttgcttggttttctccttgctgggaccaaatgcctagcagtaaacaaatttggcttcttctagttggaggggtacagccagaggtggctgctcacattgcagaagcaaaacagatgactgctggggctcaactccctttctccatttttttcccagtcccagactccagcccatgagatagagccacttatattagatcagtcttcccacctcagttagtataatctagaaaatcctcagagtcatgcccaaagacttgtcttctaggagatcctggagcttatcaaatcaaaatcagccatcacaaatgatagaagtggcatttttattgttatatcccctcccccagttttaaattagccataaagaaagagctaataaggatactcagctcttagcacccatccatggaagctgaatcagagtactcagatttcagcaccattcatggaaactgttgtgtagagagtgggtggagaaagagagcctaagacttggcactgggcaggagtggagtggagatggcagcccaagacagcataggaatcagcccttgccagcgccgtgaggagaagggagcagcctacacagaatatggaagcttgattctccttgtgcctgaggcagagacccactcttccactggccagtggcattcagatgcccagatgaccgcaaggcctccatggccagcatccctccagtggtctttcttaccttgctattccagcgcccccctcccaatgtctgagtttccctgaaggtgcttggtagttaccacactgtgttatgattgtggagacagtgagcagggggtaagttctgacgttacattttttccaaaatattaaagtcccgaggcaccatcctctaagtttctgttcacccgcaagagcggtttctaactttatttatgactttcatctgtgcaaaagggagctgagatgcgtcttagagcttccatatccccgagcttattgactgaggagaaggaagagctgacatcctcagcagttttcctttgcccgaggacccaggagctctctccatcactgttccctctttacaagacactttaagcgccctctaatcccatcagctcccccaccccaggggttgactcaagcactagttgggtctttttttttcctctaagcccaagtcatgatggaatttaaggctaaataaattgtgatcaggagaccctggcagattgagatgagaacttgaaggaaaattaattttttttctagaaaatagcatcttcagtaaggagcaaggcaaagctctgaagcaatgagaaactgaggggagtggggacaggtaaaagaaaaacagaaagaagagcctgtcagtcactacatcaggaaaaggaaacatgcacaagcaagcatacacatacacacatgcacgcacatgcacgcacacacatacacacacaggcacacacacacatgcacatgcacacacatgcatacacactcagtagaagtgattccacacttgagatgggaccctagagcaagccaccagttcaggagaccaggtaatgaaaacagcagtttgtgacactgggaataccactacagagtctcctgattgttcaacaagtgtgagctcagcagagcactgtaggctggcggtcatatcagtcactctcctgtctgtgcaccagctcctgggtcccagaaacctgttcttacagaactccttgtggtaggaacaggacacagcagaggcctctgtgtgaacacagaggaagaacttgggcctccttccattcaccactgatcccgaatgctctcctgctggcccagagttcctccaggaggaggggtgacttctggcccatctgcctcaggtattccattgtcttgcaggctatcagatttcctgggaggtgtatgggaggaatgactctcgactcacgcacaccctcaacagcacgacgcacgagtataagatccaaggactgtcatcactcaccacctataccatcgatgtggctgccttgaccgccgcaggcgtgggcgtgaccacatcatccaccatctcttcaggtgtacccccaggtcagtggatcttggcacccacactttacctgtgcttgtaatctctgaacctcctgatctggtggcatctccatgcagaagccatggagggccttaagaacaaaggccagggcttagcctcctactgagacatgtgaaggcacgtgactctgattcactctcaccctcgcctttcctgtatctcactgcatgtctctcagggtgtgagcacaagcagatgtggctagaaaggacagagaagagtagtctctgtggggctaaaacatgatcttcacaacccaaggtttccaccctctaaggcccacagacaatgaccacatggatagtagaggcctttgagaaagggaaataaatatgttgaaattaagacgaggaggggctggagatgtgcacaaggttgtgggtttataatgcaagggttccccaagttaaggcaagtagattcagagttcaaggccatccttggctacacagtaaaatgacagtcatcctgggttacatggaaccccaccacaaaaattacaaagaccatgatgctcagagctcccactactgaaacattaagaactggggtttgtaataagagaaggtggggctagggagatggaacagccttaatagcactgttgctcttacacaggacccagattctgtgtctgggcccccacatggtggctcacagctgactataactccaattccaggggatccaatgctgttttctgacctcggagggcaccaggtatacacatggaacacatacatccatgcatgcaaaatactcatatacataaataactaaacctgagaaagaaacaatagtagacacaatgatgaaagagggagcagactgcagggtgtgggtggccgcgttcagcaggccactgtggcagaatctgctcattagtgtggaaatggctgacactccttctgttgggtccctttgaaactcacaggatcttcctatacacctaactcagctccagagaacaagcactaactcctgccctcagttttaaagcttctgtttaagatggagatgttgtgttatgaaacctcacaatacctgtgcatacagggatgggaagttgccgtgggtccactggctcagtcctacaattatagctgtcaagtctcctaccatttaaaagatgctaagtaagtgctagagagatgaatcgctggtaagagcacttgctgcatgagcaggaagacctgagtttggattgcagcatccacttaagaagccaggtgtagttgcagtcaagcctgtaagcccggcactaacagggatgggggtggggtggggaaggggtggggaagagggattgctggggcttgatggctgacagcctaggtccatgttcagtgagtgactgtgtctcaaaagaccaaggtagagagtcacagagtgacaacctctcctgggctttgtacatgcacaggtgtgtgcacctgtatgcatacatgcacatacatcacatgcacatacactacatgcatgtacaccatgtacacagtgagtatgcatatatatatacacatacatgtcagcatacacacatgcacatgtgcttgtcagaacacacatatgcatgcacacacacatgcatgtcagaacacacatatgcatacacatgcacacatgcatatcagcacacacacatacacacacatgcacatgtgcatgtcagaacacacatatgcatgcacatgcacacatgcatgtcagtacacacacacatacatgcatgtcaattttccttatttgaaaactatgacaactttattcatagaggcccagaaaactcacataaactcaattcatatttgctcatcacttccagttcagtctcataacctgattgttctggagagagctacatgtgtctaaagataacgtaaaccagatgaaatgtgttcactgaagggagcccccaggagaccgtaagagtctcagaagcctcaggagccctcaggaatccctcagaaacccccagggacccttagtagcccccaggagtcccaggagccctcaggagccccatatgtccactctaaacgtacttcctctgagatgagattttgtgtggaagcagaggagatggagggagcagctgaagccacaggatgtcctcccctgctaccagtcagagatggtgctccattgagtgtgggtctagtctgcaccagcaggaggaggtgtggccaagcctttctttatcctcctgcaaatagtggccatttcacaagatagtggccctgacactcatgtgggtaccagaattatgggtgcttgtcattccactgagagttgggccccaccagaggaactaattcacggagatgaggttagactcctgagatgccttgggataacttctccattccataagcatggaaggttagcacactaaagcaactaaagggttggtttaagtcttctgcctacaaaaagagtcctcacaaaatacattttccttctatgtgtggttcacgagcacacatgcatgttatggtcagaggccagcatctgttgccttccttcattgcatcttattttgagacagtctctctcactcaacctggggctcactgattagctagaggggctgcccagcaagcacaggatgcctccccagaactgaggttataggggtcagttgccatacctgggtggagaggcaggctcttatagggcctttggagcatgctcagtgagctagtggtaaagcacagtgtggctggaagtattacttggcctttaaccctgagtcatgggggtgaagatttccaggtcctaatttcagggacaagtgggtgatcttccactggcctgttagcctacattctgagattctgaatccagttcctcatgcttgaacagctagtgctttacggactaatccatctccccagtgtgctcactgattttatcctgatacccaaaacacttacagccccagtcacagattgaaaataccattagcacatgatattttcatagcagtggccctgatgtgagcactgttttaaatgttaaaatggagcctgcagcagggataatgcaggctgcacatacagtgtgagttacaaggttttgtggcctggacactgtccacccctgacagggagtgagtgcactgacctctggaggcctctctacattcagcattactgtctctgggctatatgtcacctggaactgcagtgaaagatggaatcagaaggaagatgacagaggcatctactttgagtgagcttctgatagccaccataaagcaggctgctgagatgctgctcaagccagatcacctgtggctggagggctatactgagtaccaccctgagtcctgcaggaagagcctcctgcagcgatgagcccttctaaggagccagcttttgtttgccaagctagaggtttatgtccattagacactgaagagccatttttaagaatccagagagccaaggactagaaagaagagtcacttgtccttcgctttaaacattttctgcttcaaattcattaagtcagatacagaaggacacttaagatcctagagacccttcttgtgacaatatcaagctgttaccgaaggggctttattttcctgtggcaagacctgccttcaaataccccagcaatgcaagctaagacattttccctcaggaacctgaagaaatcaagtgtagtttttttttttcttcctctctccttctttcctttctctcttccctctttccttgtctcctctctccctctccccatctctcccctcccatattcatctcctctccttctttctttctcttagattctagagatggaaccctgagccttgtgtatgctaagcaagtattctaccactgagctacatcccagccttgtttctgttttgccctgtttatttgtttgtttgatttaaaaaaaaaataaggtctcatgtatcccaggctagccccaaacttcctgtgtacctgaggataaccttctgccttcatctcctgagtactggaattacaaaggtacactgccatgcctacctagtcttgcagtgctggggattaagcttagagctttttgggtactgggtgaaccccatctgctgaggtatacatccagccatttgtctgcactttttagagaagttcttctctgtattttccccctcctctcttgaacctatatcttccttttgggaatttctcactgtaaacacgtcattgaacttgcaagtaagcctggctctctacagagcagcccactaatatctgagtatgagtgggcttaaggccaggaaacctcacatgatggtcctcacctcccaccttatgtcatttccagaaatgagtccaggaaagagttctgcactgttacctgcttttggttgtcttggaaaccccatccaaggcctacagatttccatcccttcctcaaccctgacttcctgggcatcatgggaacaagaaaaagaagtcagaaagtcctttttggtgccagggcaggagactggaggatgtaataatgttctcttgtctttctttgcacaacaagcacctattaattatccgttctgttcagagatgaataagacaggaaccttctaatgccacttcaggtggcctgaagaacagcgggtggcactgttagaggaaggaccctgctgtgaggccttgctgggggaagctgcagggcttctcactctcctggcttggtaaacaagtgcctttttcagtaaagagtcattttaaagctgtttcttccctgacagtgcttggcaccctccctaagctttgacaaaagttaactctctccccacctctctcatccccctctagatcttcctggcgctccatccaatctggtcatttccaacatcagccctcgctcagccacactccagttccgacctggctatgatgggaagacggccatctgcaggtggattgtggaggggcaggtatgagtctcatggctttgtgtatcagttgcttctttttagtgctatagcaacatacctggcacttaacagcttaaggaaggtttatcttggctcacagttgtaggtaccctccatcaagccagggaagacatagaagcaggagctggagccagctggtcacatgacaatccataattagaaagcagagaggaatgattgctgatatttagctcattttctcttttttattcagttcaggaccccagcccgtgggatgggaatgcccagattaagagtgggtcttcctacctcaactgactcaatctggaaactcactcatagacatggccaaagttgtatcttctaggtatcctagatgctatcaagttcccaatattaaccactaccccctggaagctggggcttcccagtatgaagatgacaaggacctgcccttggggattgttacagttcttgtagagcgaatcctcagatgttgtaggaactccaggaaggctaaaaggggcttggagggatgatagggacagaaataacatcagactctggggacaggataggccaagatgagaagaccagggtcctgtcagataatcagagaagagagaataactgtgaaatctcaagggccattccagagtggaacccgagttagatagcacagatgattggtttttaaattctacaacacagttagctaccagactggtacagcttgtctggcaaagaacatcatgggttcagcggcctttctagagcaggctctgtctccaggtgctgttttgggcatggaggatccaatggtagcttgtgctatggagggaaaccttccctcctgtgtggcagcatctccttcttcagggtatgtctggagacaccatggtacattaagaagtgatggaaatatctatcatattagccctaggatgggccatggaaaagactcaatgtagtgccaagggctataacaagcatgggagggcttgggcatgtaggaggactgtgtggatagggtctgctggcatggacaaatatcactcattctaccagttccatagtgtgataatggagaaaaagatgaagaaccaaattgtgagtagtgagtagtgaagtttggaaataactcctgtgtgattagttcctggtgacctattgctattcttgcactgtataggagaaatctcttctgggaattggctgtgaattacaaagtgaatcttatgcatacatgtacaaaagttttaccaactccacctttctggaaatctctgtagaatccctatctagatggaagtgattcatcactggggatgagactgtttactcaggaaaaataagatttatctatatttcatatctaataaaaaagacagaaagaaaaaactcaccattaataaaacaaaaatgatggtagaaagtagactttaaaactcttaaaagaaaaatgtgcctgtggaaaactaattgtcacagttcagtgtttattggtcttagtaggtgagcaagcactaaggcacacctgttgttccttgaagtatcattatactccttgtttatttctctctcatctctccttatccactggcagccacttgttttctcctgtcaccatagatcacacatcttttttgttcaaaagagtcaactgccctttttcccagtgccatgccctgttggcaacacctaggccttggaaagtccctgtatgattccttctagtggtaccacttagcactcttctgtccccctgtgttctttaaaccagaagttcatcacacaaacttgatgagataggtctccctctcttcttcctgcctgccttccttctttccttatttctttccttcttttctttctttcctccttcctgaatcctcagcatactcttgatgttctgagaatgttgaggtagatcaagaacatagagtctaaatagagcagcatataggaatgaactgcctaggccctaatcactactctgttatttctcccactgatattttctccaatgaacttatccatgcaaatctctttcacctgaattgttgtctttggatattcacaatggtaatttcctcattctctcaactactttactcaatctatctctggaactttgaagaggagcccttgtccttatcccccatattttttaggtactccaaagccaggaaggtagaaaaccacttagctctctttactttttttcacctgtaagttatcaaagtgaggaacagcctacttcttccaatattaaacaaatttactttctttgtgtgtatgtcctatctttttcctaccattgcaacgactatgaaagcatatgcatttatattcaatgtgttccaggtgcactcactgctctatattaatcagtgtatctgtgtgtgtctctgtgtgtgtgtgtgtgtgtgtgtgtgtgtgtgcgtgcgcacacacacacatgcacatgccatgtgtgtatgcatatgtacgtataccattgtgcatatatggaagttagagaaagctgtaccgtgttaatttttactgttaccttgtgtgagacagtatcacttgagggttgtgtagaccgggtgagtttgctcctgggctctgggagtctcctgcttctgcctcttatctattcatgggaacacagggattatggacatatgctaccatatccagctttatgtaggctctgatgattcaaactcaagtccttgtgcttgcatggtgatcacttcacccatcaaggtgtttatctcctttaccccattgctattcattaagccctaaatttgcttatccttatccctttgtgaactaggtctcttgacatgaagtcattttattttctggtggtacatggtgttccaggacatggtgccttcctgcttcaagcttatatgagctgttcctacatagacttcaagtagtcccaagtaacatttaaagatcataacctgagcatcaagatctcagggagctcattgctaccatctgctcattgcttctagacttttcaggtcagaagattgttagatttacttattttatgttcatatgtgttttgcctatacacacatttatgtactgtacatatctggtgttcatggaaaacagactaggacatcagatcaactagaactggagttacaaacagttgtaagccatcatgtgtgtcctcaaactcgaacctgtgccctctggaagaatacccaatgctcttgaccactgagctatctctccaacccctagaaaaatattttttattttgttttgtatttttaacaccaaaaggtaacagtgatattttcagttccaatcaaatatcattgttcttaaatttatatcttatactaaatgtgccttatactaaaattaatttttcagaagccccaatgttcttattttctctgcctattatattgaatataaaaccacaattccaacagattaatcaacaagaataccgaatgcaatgtaagtgtttgtccttgagtttaattctctcctataatcacagcaaaaaatgctgagctttaaaaaagaaatcacccaatagcattcttctttctgtgctttcatcatcaacttgtatataactagacacatccatttcagatattgtcttcttttgtcttgcctattagcagttactttatataaaaatcatttcacctgagagaaattgctagggcttttcaggattgctttcattttgtaaccatttacattattgcaagtttataactatttgcattgttgcagagtcaaagctatagaaaagtgatctgctgggaagtctaggttctctcacctgtcactatactaccatgccaacttgaattttggtctatcctttgtgtgtatgtgctcatgtgtgtgcaggtgcatatatgtgtgcacatgtgtacctattcatgtagagatcagaggtcagcctcagctcttattcctctgatactgtacacctgggttttggaacagagtctctatggacttggggctcaccaaacagtttaggttagctggctagccagccctgtggatactcttgtctctaataccaaaacatggattataagtgtacatcagccatgcctgggttgtttttacttgcaaatcaggttgcaaggtaagcatttactgaatgagctactactgctgccctctgttcttctctttgacaacagaaataaatctacatatttgcattatctttcttatgtggaattcagcctcctctcttccctcagtgacagttactccacatctgttcatttcctggtggctccctctatcttttcctgcagttgaactggtctccccagatcttacctgctataaattatttagccagtcctctatgttggacatgtggtttctaccactgctatcaacaaactgacaaacacagagtgcatacacaatacaaacatatatgtgcaattaaagttctgcatgtcgtaagtctagtgtgggtttcatagctaatgcatggtgtccatagggcagcaccctctccagagactctagcaaggagctgattctgtgattattaatgcaaaggtagaaatcagttctgtgttgaaagtctgaggtttggtatgtggaaagctatgggtcagcagggtgattctagctgctgaggtctccttgttgggtgtcttcccatcttgaaggtaagctacagaaaagtgactcatcttcaggcttggcatctccttgtgtttggtctcacctcactgaccctcttccactgctttgtacccctgtgatggctttgggccaaataatctcactattttatcttgatgcttttagccttactgccatcagcctagagtcatcagctatgtgctgcactgtgtgcatacattccaggaatcaaaggggatcctgattagggaggaattttttaccaagaagtctgtcttattgttttgtatttttgctactgtaccttcagattataacctaggcatgaggcttatgggtcaaacagcaactgcattctaactctttccagaaactgtcagacatatcttttatgggtctacacatggcatgctcatcaaaaacgtgtatgtagcatgagtagaattaaaagcctaactttcaatagaattaagtgcaacttctgagtcttctcttgcatgctctggataggtaacaaggctttcccaatttgtatgttctgaaggagacctaaccaatttcctgcccccacttctattcccataagcgcttgtgtgcatttatgagctttccctccctccctcccttccttatttccttcttttcttccttccatccttcctttctcccttccttttttgtgaggaattgcaggctggtctccagtcaagctgaggtctgaaccctgatggtcataactcacctacatgacacgataggtgtttcctcatgctctggaactccagcctctgcctaaggtatgacctcccacagcccccacaagagaagcatggtcagtagtcatgtaaacaatggccaaagcttctgaccttcaggctaaactcctctccagttacctagcaacagtgaagaccataaaatggggtgctcaatccccacctctctctcttactcctttgtcctcttgcctctcactactctctcctcttccctttctctttgccttctcctctcctctctcctttctctttctctctctttctctctagccttcccccccccccaccttctccctttcccctgcatttctataacaaagctcttaaaccatagatagtctttgcaccttcaagttccgctacgaactctggtcagtgttgggaacttcttcccctatttcctctctcccacaaccctggggcgctagcaaggtagctcttggagggttcccagtcgggggctgccccttttccatccctgctgcgtgggtcaagcatgctcacctggtgccctgtggaaaagcgtcagacagctctacctgtgtccacctgcccagagcacaggagctctggccggacgttaggcaccttttcctttcgccctcttctccagggccccagggcccccctttattttgttctcaacatttttttctttccatccatccatctttctttcttccttttaaaagtatttttaaaatattatgcatggtaggcagatgctttaccactgagccacaccctggcccctcactggggaattctaggcaggtgctctatcactgagccacacccccagcccctaactgccactgtaccactgaactacatacatagccctttttattatttatatttgagacaaggtctcattaagcttcccaacctggattttaactcatcctatagccaagcctagtcttgaactcttgatcctcctgccttaacattccatgtagctggagttgcaggtctaccacaccacatcagccttctttgtctgttttatttccttttacagtcttgctgagagagctcagctcctttatcatactaagttgaagctgtgataggagaccatctttcttatttctaactttaaagaaattttttaaggttttattatcaaaaatgacatttatggagggtgtccctcttttttatagctgttttttctgtgttaagacaattgttttccaatcctggtttgctagggcattttctccttgttcttattattattttgcattttattttatttattggagcggataggtgtacacataccacagcacatatgtgaaggtcaaaggacaacttgttggagtcagttcttcctctccactgtgggtcccagtgatggaacccgactcatcaggcttgactgcaagcccctctaagccatctcactgaccctaatattgttttccattgagcttagcttttcctggcttcaggttggacttagtttttaggaccaatggctgcaccttatctgtccctgtcactctgggtgccccagcaaggaagctctgggacctgttacctacaaatagaccaagtccctgccccatggattctggctctgcttctctgaggctatcaacagtcagtccaaagccatctcttaaaattctacctacactaaaaccatttataagtctctacagtgaaagccatctttctggcaatagcatgacctttgtacaggaaactcccaggagctgagatcgcccacacataactgcacaggattgggcccctcaacctcccatcatggaggagagaggggtttatgagcccctcttagaagtatttaatagttactgaggaagggaaggaaagaaagaaggaagaattattttcttcattagtgtaaccactgggaggaagaaggggattcaatgggagtgggaaggcagccaagagaaatcaatggaggatgaataaggtcaaaatacacacacacacacacacacacacacacacacacacacacannnnnnnnnnnnnnnnnnnnnnnnnnnnnnnnnnnnnnnnnnnnnnnnnnnnncacccacctcctaccctaacccccagccccaccctactaaggcttacacaaagacccctccaagttctgtgtattgtgccaggacctcctcagagtaacatggtctgattctacgacacaaacactcccagcttttccaccccactggtcaccttcagccatagacataatttttgtgacaaacagttttgaaaattatcagacactcatgtcctatagagcttttcaatttggatgtattggaacacttcatgaatcttccagaatctttgcttttggtcctagccatcactgggtgattctaggcaggggctctaccactgagccacaacccagcccctcactgggggattctaggcagaggctcttccactgagccacaacccagcccctcactggggaattctaggcaggggctctaccactatgctacctacattcctggacctctttactttctattttgatagagagtctcagtaggtttcccagcttggtcttgaacttatggtcctgtcctgtcctctcttagtagctagaatcacaggtctgtaataccaggcctggtcccagtcaaatcatgccaacctattcccaatatttcagtcccaccttgtttttccaactagagtcagcaacactcactggctctggccctggttgctacttatttagatttagctatacgtctgccattttctttcctggtcatctctcccaaagttttccctcctggctcaatttgctttcctttcgattacatctgttcactgttttcacagttgcaatgctgagaatgttaacatctcccgtggcacaaccaggaaatctagaaatatctttacttttgtgctatcctctgaatgccaatttagcgttctaagtgctggaatagaaagtctgaagataatagccctgtttcttctcgttactgttgctgagctgaagcttgcttctaccccgttttactttgccaataatcaagtatcttaggagctgtattctgtactattgagtagctttactgtatgtcaggtctagaaagctctttgattcgttttttttttttttcatgtgtatgtattgtatgcatacatatgtgtggttgtgcatgtgagcgtggaatccagaggttgacatcagacatctttctaggttgttctccactttatttattgagggtctctctcagtgatcccaagctcacagatccaactagtctagctagccagtttgcctccaaggatcccgtttctgcatcctgaatgcgagattgtagctgagcccctatgcccatcaggcttttctgtgagtactgggttcccaactctggtcctcacatttatagcaagcactttacccatcaagatagctcccaaagccccggagtgcttttgaagtcaggatatattaaatgctttgaatctaaaaattcatttgttctggaaaattctttgttgcaatctgtttgaatgtggcctctccactgcctgttgtctcttgtcgggcttcttactggatataagaaattgctcttctctttatcctcccggtctcttaccatctgcttcctatttttcttgtctttatctctttgtgcgcatatctacataataccctcagatgtggcttccagtaaattaattctctgttgacctgtatctcattggcctttttttcctctttatatgttttcaatctcagtgacagttatttacactttatacagctctattatttctgcctcttaaaataagtagtaatagtgacatattctgtccatggtattattggtgttattcatttattattggtgtgtgtgtgtgtgtgtgtgtgtgtttcacatacatttgtatagcagccttgaggtcaactttgggtaacattttccaagacactgtctatcttggtttgtttgtttgtttggaaactgaatctctcactggcctggattaagctgggtttgttggctatcaagcctcaaagatcctcctgtctctacctccctagcactggaattacaagcctgcatcatcaaagctggtgacttacatgggttctggagctcaaacttaggttctccagcttgcaaagcaagcgctgcacctactgagccatctctccctcccacagttgattctcattgctttactcgggtttttggttttggtgataacattgttaaggtcctcttcatgtgagcccagtctagccctgggcttgtgatcctcctgtgagagcctctccagtgctgggcttacagttacactagcacccagctgcaatccatcccatgtatctttctatgacttctggtctgggggggatttggtcttttgtttgttttccctataaccaccctcaatggtttggtggtgcaatttcatgtctctgcccaatgctttttaatcatcactcgatgttccctttctctagaccctccaaaccagagtgtagcatgcatggcgttggggagaaatgtttccattcccatgcattagctccccttccagcagccagaggccccttttctccccagttttgtttgcagaatgcaagggggagcagagtggatccttctgcttacctctgctgtgcaaaggccctgtggttcacctctgtgaaccttctcccacccctgccttgctaatggagatcctcaccccgagccagccacacttgccatttccccagctgagtggctgtaacagtaacctcctctctggcttttggtttctgggtttattcagcccaccgttttgcaggaactgaaaggcctgtcctcgcattcctgcaacaatatttcacttacctcagagtctaaaagttgaagtttcagaatgcaaagcagctctctccccctaaggccgggttcctgtgtccatctctgttctcagctggctaacggtcacctataaatagaagcctagatcacatccctggaggactggtttctagatgtacctccaggctctgtggaacatatggaggtcggaggacaagaagttagaaggaagctgctgcagtctcatccttggtgtttgagaacgcgagtagcttaggggacagggaggaacatattgtgcatgtgtggctgtggcatctctccccagctgggtctttgtgccacttgaaagcagcagattttgctttctgaacaggcttccccagcagagtgccggggagggagggaaatgggatctcttagagtgcagaaagctgaggtgcctctcacatgctttcaaaggaaattggtggtagactgttctagaaggctttgtttcacttccaggaccattgcagtgctgtgcttcctgggagactccacagcatacctgcagcatcgagcctcaggagaccctcccaggaaagagttggggggagggtgacttcagcttctctgatgccaagagaagaggctaaagcacagcacagcctgccgcctgaccattgctggagttgtaagggtcatagcctgggcctgggcagccctaacaagttaggcttgcacccctcctcaaagagacaagaaataatgaaggggaggaagagggaaagaagtgatttaatgtgtccatatcaggattaaagaagttaagtgtcccccagtccatctttggggttctgacacggggcttagactgtaaaagaggacattccctatcaggggaggccccactgacagcattgtcaggaccccagtctctcctgcaaggagatctgagtagtcatcagaactgtgtgaaacctctttccaggagacacgtttcccttgggctggacctggcttctgctttttccttatcccagcatgagacttctgggaaaattccaatttcgtgaaatttgttttaatagacagaccaaagacaggggcacaagtgtctctttagaatttctctctctgtctctctgtccctgtctctctctctctctctctctctctctgtgtgtgtgtgtgtgtgtgtgtgtgtgtgtgtgtgtgtgtgtgtgtgtgtgatatgcacttgtacacaccccatcctccatcacttccctgtatggtcagaggcaagggctgtcactgaacctagaacttgccatttcagctagattgactaacttgtgagctcccaaggtgctactctccccacctcctcagcactgaagtcacaggtgcacactgccacacctagctactcttacgtgagtgtaagagtcatgaacttgggtcctactacagctagtctttgctactttatgggtccttctttctcccacccccatcactagataggattttttcttgtttcttctttgagcacaactactaacaagccacaaccaatccccctgaacaaccaacaaccacccaccctgcctctcagggccctaacatttatatactttctgaaaagttcccagaattccaattgtcacacaatcacagaaagtacctgaagttggcaaaaccattcctctgctagagcagaaggcaaatcatagtcagctgtgtgaagcagccccgtatcccacacctgggattaaaacaaaaacatagtcttatgatattatgtttttttttttttttaagaaagcaaaattccagagttctcactccaggtcctcatggttgcacagaaagcactttatccactgagccatatcccagcgcccctctgtagtctcttcattcctgcctcaggatggttacatgagggacaggtagggttcacagaggacacctaggctgtggagaggctggctgatcagggagccttagggatccacctgctcccgtttccctagtgctaggactatgatcgatcatatgctaccaggctctgctttcttttatatgtgttctggggattggactcgagtcttctccctcccctggtaagcaccttacctnnnnnnnnnnnnnnnnnnnnnnnnnnnnnnnnnnnnnnnnnnnnnnnnnnnnnnnntctttccccccctcccaccccacccctctgcaccaaggtttttggcttcagttctcctcagtgaattatgggatgaaagatgcttgctatcggaaaagctccttataagacccttgttgtgttgatgctcaggtgtgggtttaaaaaagaagcagcagcttttgtgggtatttctggctccataatgctttgcttaattagtaacctctggctgcagctggagcagaacagctcttcccacgttttcactccagtacctgttgtccttggccacgctctccctaccccttgctcctttccctcggcccctgccgcacatggccatttgctgcactctaatagcccaaattgccgcctgtctcctgcaaaggctgctcagggcgggatttttcggtaatgaagatgctctccgtaacactttgggtatagataaaactgtttccattctgaaaatggaaagcagagatgggggtgggggggaacccactaagtgcttatttgtgcataatagtagccattttcttaaaaaggggctgttttagagagtgttatgggctaataaaataaaacacgaatctgttccacactggtctcctggtaactaaggaaccgtggagatggagatactgtgtagccccagtatcttcagaggcaacgcttacagacaccaaggttacccacagtgtcagtagccatccttgttgaagtgacttgtgcctgggagacaccagggcacaaggcaatgctatgtgtgtctctcaccccaaccccatgtgtgcagcaggatcctgggactcgattggatggaactgatagatggaaggccacgggtggtgcttcgtttttttcagtgtgtgccgcacatagccacaaaagtgaatcacagggttatctgtttacctaacaagccattttatatgaagcctcttgcaatacatacacactagaggtgaattccaaggcaagcctggtctgaacagctgagcatgcctgtctccttattagaggcttctgttcccagacagagccttccctctgcctatgcagccagggatggaagtgtttggctgtgggtcccagcctgggcacttcctctgcaccctctgctgaactctatggatccactcctgcctttagccacactagctaagcactgcataaactccaggccctggacttagggcaacagagacaagacaataatattcccagcatcagtcaaggaggaaagacactcattgaagatatagacaccagagcctcatggcaaggatcaccatgagcagaggttaccatggctcccatgtatatacagacaatcccctgtgtgtgtataaacagtgccagcctactatagttcaactcctaaactctcagctccactctgttacaaaagcaatagcatacatgtcgccaaccttttctaagtattattgcttatagttctgtggtccgccatggctatgtatgtgtgcatgagctagtcaacactttactataaaatagagctcacactaaagggcatcggccatgtgtgggccactgagaatggttaatgaggaccaggctaagctgggatgcttggtagggtcaggtcaggtcaggtcaggtgtgttcagaacattctccttgtgcattgatttctctgtgggttggatttattgtgactaaagccttctaacccaatgggcattctgcttgtctaccccccctctctctgtgtgtgtgtgtgtgtgtgtgtgtgtgtgtgtgtgtgtgtgtgtatacacgcacgcgcactacacatgaagggcagaagtagatatcaggtgtcctcaatcacttctccacattttttgagacagggtctctcgcttaacctagagctcaccaaccaaccgactagactggctggcgagtgtactccaggggtctgcctcccccacttctggagttgctggcatgtgctgtcacatatagctttttgtgtgggctctggggctccagaagcacatcctcatgagtgcacagcaagcgctttattgctagaaccgtctctcctgccccagcgcatctgtttggcggggatgtttttctctttcagagctggtgcaagtttaaagacagtacactagtcttacacgcgttctcgcgaccggccaggaaagacgcaacaaaccggaatcttctgcagcaaaactttattgcttacatcttcaggagtaagagtgcaagcccccccattgcttacatctttaggagccagagcgccagagcgccagagcgccagagcgccgagcaagagctctattgtttacatctttaggagcaagagagcaagccccaagcccaaaaacgaaagcgaaaccccttccctcttaaggagagttatccttcgcctaggacgtatcactccctgattggctgcagcccatggtcgagttgtagtcacggggaaggcagagtacatggggtggagaactacctttggcacatgcgcagattatttgtttaccacttagaacacagctgtcagcgccatcttgtaacggcgaatgtgggggcagcttcccacagttcccccttttctattaataagagcaataggccacccatattaatgagagtggagatagaggtcaaatccccagtatgcaggtaaaggagccgtacacataacctccttccaggctcatcacctagaggggtcctggtctggtcccgtgttgtttttcctggaggaaggacacttgaacactcaaccttcttgaaagatgacatgtctccctaaaataggctcatatatgccgcagagcccttctactgcagtgcttagccgtgcaactctctcgggctgctgaagcacactcactctatcccgtgcaatgagactagcctcgtggtgtgcaagagctgagtggccagcgacctattgcttaagcatagataaccataaatcaggggaagcaccatgttctagagctgcaagcgcctgggcaataaccaccttgtctctcctagtgtgggccttaagcttacagaccaaccaaagaagcaacactaatccacagcaaagtgtatctccaaataatatcaatcccacccattctttaaagaaggaaaatgctgaggagatccaattgggtaatcctttggtcagggacaggtctaagcgcgtggagttgacctgaagtctcaattcccgaaggatctgttcaaattcagccgtccaattctgtaacatatactgagaaagactttttgacaaattagctgccctagtaaatttctcatactgaatggaagtaacacacaatcccggaaacttttgttcacatcccagctgagctatttgccataatacatctagttgtttctggacaagatctatgagttgattaaccagcatgagaccaccctgtatcttgacattagctgaggcctgtttatctatgactgtagtcannnnnnnnnnnnnnnnnnnnnnnnnnnnnnnnnnnnnnnnnnnnnnnnnnnnnnnnnnnnnnnnnnnnnnnnnnnnnnnnnnnnnnnnnnnnnnnnnnnnnnnnnnnnnnnnnnnnnnnnnnnnnnnnnnnnnnnnnnnnnnnnnnnnnnnnnnnnnnnnnnnnnnnnnnnnnnnnnnnnnnnnnnnnnnnnnnnnnnnnnnnnnnnnnnnnnnnnnnnnnnnnnnnnnnnnnnnnnnnnnnnnnnnnnnnnnnnnnnnnnnnnnnnnnnnnnnnnnnnnnnnnnnnnnnnnnnnnnnnnnnnnnnnnnnnnnnnnnnnnnnnnnnnnnnnnnnnnnnnnnnnnnnnnnnnnnnnnnnnnnnnnnnnnnnnnnnnnnnnnnnnnnnnnnnnnnnnnnnnnnnnnnnnnnnnnnnnnnnnnnnnnnnnnnnnnnnnnnnnnnnnnnnnnnnnnnnnnnnnnnnnnnnnnnnnnnnnnnnnnnnnnnnnnnnnnnnnnnnnnnnnnnnnnnnnnnnnnnnnnnnnnnnnnnnnnnnnnnnnnnnnnnnnnnnnnnnnnnnnnnnnnnnnnnnnnnnnnnnnnnnnnnnnnnnnnnnnnnnnnnnnnnnnnnnnnnnnnnnnnnnnnnnnnnnnnnnnnnnnnnnnnnnnnnnnnnnnnnnnnnnnnnnnnnnnnnnnnnnnnnnnnnnnnnnnnnnnnnnnnnnnnnnnnnnnnnnnnnnnnnnnnnnnnnnnnnnnnnnnnnnnnnnnnnnnnnnnnnnnnnnnnnnnnnnnnnnnnnnnnnnnnnnnnnnnnnnnnnnnnnnnnnnnnnnnnnnnnnnnnnnnnnnnnnnnnnnnnnnnnnnnnnnnnnnnnnnnnnnnnnnnnnnnnnnnnnnnnnnnnnnnnnnnnnnnnnnnnnnnnnnnnnnnnnnnnnnnnnnnnnnnnnnnnnnnnnnnnnnnnnnnnnnnnnnnnnnnnnnnnnnnnnnnnnnnnnnnnnnnnnnnnnnnnnnnnnnnnnnnnnnnnnnnnnnnnnnnnnnnnnnnnnnnnnnnnnnnnnnnnnnnnnnnnnnnnnnnnnnnnnnnnnnnnnnnnnnnnnnnnnnnnnnnnnnnnnnnnnnnnnnnnnnnnnnnnnnnnnnnnnnnnnnnnnnnnnnnnnnnnnnnnnnnnnnnnnnnnnnnnnnnnnnnnnnnnnnnnnnnnnnnnnnnnnnnnnnnnnnnnnnnnnnnnnnnnnnnnnnnnnnnnnnnnnnnnnnnnnnnnnnnnnnnnnnnnnnnnnnnnnnnnnnnnnnnnnnnnnnnnnnnnnnnnnnnnnnnnnnnnnnnnnnnnnnnnnnnnnnnnnnnnnnnnnnnnnnnnnnnnnnnnnnnnnnnnnnnnnnnnnnnnnnnnnnnnnnnnnnnnnnnnnnnnnnnnnnnnnnnnnnnnnnnnnnnnnnnnnnnnnnnnnnnnnnnnnnnnnnnnnnnnnnnnnnnnnnnnnnnnnnnnnntcccctttataatcctgatctacaactccagggtggacaataagaccttgtaggctgcaagagcctgcctctgtctctctggccacaaaatctgagaaggactcctgaggtccctggacgatctttgttagttgtccagtggcttcacctgctcgggagagcgcctgttaggccctaatagccttttcatctgattcagaactactaagaactggctccttgagctcacctagtgatgagtataggctccttctcctagaagcctccgctgattgatcttttttcttttctttttccttctccttccttccaatctctccccaggtattcttacctgacctaaacttttcctcgggttcaagacccttggaaaggcctgtatacttagtttgtgtaccatatttcctctttgctcctactctctctccccgctttacttctgatagattgccctgaattttatccagaattttcagccctgccttaaccacttgataacatgtgaaaaggaacaaaagggctcctaacactagaaaaagttcaaggccaaacataccttgtaaagctattccccactttacttctgatagactgtcttgaatttcattagaaagttcaagaccagacttaccttgtaaagctatacttacgggtaccctgttccccagctgaagagttctgaattcacgcagttgaatccttctcaacagtctgttttacgggaacacttcattaccaccattccccagctgaagagttctgaatccacgctggatccttctcaacagtctgttttacgggaacctttatgaccgtgacccgcagttctggttccggaatgaggaatcttccttgcgccggtgatggttaactcccgtcccgagttttcttgtcccgggtttcggcaccaactcttacacacgttctcgctaccggccaggaaagacgcaacaaaccggaatcttctgcggcaaaactttattgcttacatcttcaggagtaagagtgcaagccccccattgcttacatctttaggagccagagcgccagagcgccagagcgccgagcaagagctctattgtttacatctttaggagcaagagagcaagccccaagcccaaaaacgaaagtgaaaccccttccctcttaaggagagttatccttcgcctaggacgtatcactccctgattggctgcagcccatggccgagttgtagtcacggggaaggcagagtacatggggtggagaactacctttggcacatgcgcagattatttgtttatcacttagaacacagctgtcagcgccatcttgtaatggcgaatgtgggggcggcttcccacacactaggcagccagggttctgccaggccttggggttcttggagtgagatagcccaaactagacattggcctgctggctgctggttgggaccagctgagcctgcttacatgtgtgtggctgtgggtgagacctgggaggggcaggatagatactttaggactgatgccccctcaatcagtcattggaaagggagcagggtccatcagagctgagtctgggaagcaggctgtgctaggatgaacaaagaaacttcccccttgcctcagtttctctaccccaaaacttggaggcatttaacgctttatcctggagccagtccacaatatgcacttaataaatggaaagagagacttcattcccagggaaagggagagagctaatgtagacctaaaccagagtaaaacacaaataggccaccagaatgggctcaggcctagggtatatgtgacagtctaggtccaggtgaggcctgagctcacaggagctcacaggagctcagagggaggccagagacacagaaactcccatgctagcttaagtggacagagaaccaaggttggccacactcccattgcatgcagagatccacagtccagaagtctcccccagttctggagctaaaacatttctggtgttgattgggtcagagcctgggccctggtagccctagtaaactaagctctcccacccctccacagcgatgcccattaaagaatcctgtgatagaaaaagagatgtattcaatgtggccaccataggaagagaaaaaagttaaaaggtctagtggcctccaaatccatctttgtggtcctgacatggagtttgggtttaaatagatgacagggttgtgtacagctacgccatcttggccaagtaaggacctcacacatcacggaactctgactgtctctgttccagcctctccagcaagggcggctgagtagttgtcagagctgtgtgaaacctccttttgggagacaagttcctcctctggctggcaccacgcttctgccttttccttctcctagagtgaggctggggaaatgccagtcccttggggcacattgtcttgaaaatctgatagtcaaaggaagggtgccagtgtctcagattctctttgctccttctgacgaccactgagaggaaagacactaccagtgacgtgctcaaatggagcctgagtctgggctccattgcccagtaaaagttaaacccagaaatagcaagaagctagccaagcttcataccaggcccccggcttcacctggcccagggggtggcacatctctgcaggcaggtcgacctgttcctgcccccccacacacacacacacataccccagcaggtcacctgctttgggaagtggactactgcaggagtactaagcagttctcacagctccatgtacacataaatgtcctgcacttgttatccttgtggggagagtgagagagaaagagagacagagagagagagaacacgcacatgtgcatgtttgcactgcatggcatatttggcggtcaggtttcagtcctggtcttcaatcttgtctaagatggggcctcttgctcaccactgtttcattggggtagcaggcttggaagatcctggaaatgtgaatgtctcactgtcccatctcctcactttagcactgagattacaggtgcgttctgccctggccagctttacgagggtttgggggatctgaactcgggtgttcacacttacacagtaggcactttacccaccaatccacttcaccagcacccttctgtatttctgtcatgtggttattgtccttgtctgtgtggtgatgttagccgggtgggaccaggatccttaccaaccaagtcttggctgtgacctcacactgagacagggcccaatatgcacaagcagaagccagggagctcctgttgagccagcagatggaccatgccacaaatgccacctgggtcagagcagcccagctgatggagaactcctcccttaaagcgcctcttacatctctttggcttactgtcaccttgcaaagtggcagatttcacaggccacatcctctcagccccacttcaacctctataagatagcatgtctgaccccacccgggtcacctcctgtccttccctgctgtggatgacgtggaccctggaggagcatctgttagccttgccgatgtagtaaaccccaccatcgttgaattcccttttcctaataggaagagtgacattattttccagctgtctggcgtgtgtacagaggaaagccatcagtagctctaatgggcccttcagcaataacacagtgatctgcataaatccacagagacaatgtcatcctttgctcggccatggcacttccccctacgcagttgggttccatggtgacaggtaacaatgtaaggcacttggatatttccacatttgttgtttgtgtgattggccctgatgatagccatacaatgacttctcgtcatgctccttgaccaccacaggaaatctgtaaggcgtgaggagcttggactcggcctccctacttattagtctgtcagatccttttagttctgttacagggacttgaggctcagtcagtgaagggcctgctacagaagcctgaggatccccagcacccatgataaagccaggctgggaagcacatacctgtagtctcatcactagacagggaggagcaagagatctcaaggccttgttggccnnnnnnnnnnnnnnnnnnnnatgtgcttcacatacacatattatacatatcacatttatacttacacacacacacgcatacatatcaaagatacatacagcgtgcacacacatcacatgtgcacataccacatatatactacacacttaccattacaaataccatttctggaaacagaggtcaatgggtatatgaacctcagctgtgggaccaaagtcagtatcaccaggatgagcttcaccgggttcagagtcaccagggtgagggtcaccagggtcagaagcccagaaagtgttctgtgtagagaaggctgagagaagtctcttcctggacagggggctcttagggagagctgcacccctaaggggagagaagagaggagtgggaggctatctcagaggggacactataaagaatggtgactggatgtactgtcttagaggggataggagacaggtgctctagatctaaggctggtttattccaatggatatagtgagctccccccaagggatcatattaagagtggggcctttggaaggtaattgtgacatgagtgtggaacccccttgtatgacgttaatacctttattaaacagactgggataagtcatgagcatagagcacctgcctagaatcccccagtagggggctaaagtgtggctcagtggtagagcccctgcctagaatcccccagtgaggggttaggagtattagtcattagtagaacacttgcttagaatccctcagtttgggcccagggttcaatggcatacattgaagtacctcctagcatacatgaggctctggcttccattccctacattgcatttaaaatgaaaaatagtacatcagagagttcccaacctcttaataccatgtgagggttccaatcataagtaggctgtcaccatcacatgccagtcctgcgcttgcagtctccacaattgggaagtgatggtttctgtggtgtgtgttacagcagcctgaagcatctcagactcagcagaggctgctagcctggaacctgggtagccaaggccagaatagaggcgttctcttttaaattcattgagccagaccatcatcagcatactccaagtaaaggcaggcagcctcttatgtgggagccttacgatgggctagccgagtccacaagggaagctctgtcaccaaggacttggccatttgggagtcctgggggatgggggttggggtggggcttgaaaagccagagggaggccaagagagccagtggctgagaagccccagctcacagattaggaccagaagaatccagaaggaaatgcagacagctatttcccactcacaggataagaacattaggctggggagacagctcagtaagaacccaagctcagttccaaactcgtgtaaagatcaggtgtggtggtgcatgctacagggggcgccctggcatggtacattcagtagactctgggttcagtgacagactctgtgtctaaaaccaaggtggagtgggcttggaaagatgggtcagcagttaagaatactagttgctgctgcagaggacccagtttcggttcccagcactcacataacagctcacagttatctggaactccagtggcaagggatccagtgttctcctctgattgccacaggaaccagggacacaagcagtatgcgtacatacatgcaggcaaaacactgaaacacataaaataagtaaatctacagtaaaggaaagaaaaagcaagcaaggaaagaaggtgaggcagctgcctcaggagggacagcaaggctgacggatggcctctcacacatgcacaaccacatatgtgtatgtgggcattcacacacacacacggtcgtgaacacaaacacacacacagagagagagagagagagagagagaaagagagagagagagagagaatttaacagtaaagcaagaaacaagtggaaactaaaactatactaagcaggaagaaaggcagcctccttgagaaaagagctccacaaatcctgcccttctcaaagcatgcagcctccttgccagcggagatcaatcaagggctaaggagaatccccttaacaactcattagcttgcaagagttccggatctgctctgggaactggcctttgggcctccccaagcctctagtttcttcctggttgggttgtacctttgccagaaatgcaaaccccatctgtccctctgccgccatgccctccagcacccctcgtttggggaagcttcatttggctcaggcacagggacaccactccgaaaccacggggtctgagtatctgcgaagttgcaagttttcctgctgacggcagagtttcagccaggcagggtgtgtggggctggcaggtttccacatagttctgagatgtctccccttctgctgggctccgaatgaaaggacagctgcttccttgtcagtccttcctccatgtaccctcctctccatctgtgtgacacccttgacatggagttaatgactgaagtccttagagtgtagggtgctgagcagacaccaggttcctctagcagggacattcagtatcctgcgtaggccacctgatttccccaaagcttctcagaggcccagctgaaccaagagacttgtctcatgctcaaaactggagctgtgtagaaactgcttggcaggggtggcaggctctgagacttctgcttgttaaatgaacacacatgtccaaataggtcccgcttcccggccagctggtgccaaatgcagactagacgtggtggcaggcaagccattggccctcctgaaggagcctgccacctcctcagagggattatgcagtccttaatgctgtgaaggacctgcccctgccgagtggcgtttgaaacacaggcatttcagcttctataataagcattgtaaagtactgtttgtcggctttcagagaataaaggggagaaggcctttctaaatcccatcttccctgtgggagcttcaatttgttttatcattagagtcctgactcactctgtgtccagtgtgctggtagtagcaagtcacttacttccagaacactctaatgtgaaggcctggaagttcactgagtcagaggagccaggcaaggattaaagagtcctggtctccttagataaagacataaaactttcagttataggaatgtaagactctttgccaggttctacaagaaaagccagtggtttaggcaagaatgaatctttggcatcccatgccagcggccccatatgttgtcctggtttttaaaaataattcatatgatcaattgcatgttagatatacacgactgaatgccaagttttacactggacccctgggcacaggggagagtgggagctaatacctaagtgtgagtggaataacagtcaggcaggactgctacaaagtttgccctgtggctctgggagccacactcaagcaggtggatgctttgccattaaggggctgaatagtaaatcttttcctgaccacatgatctctgttgtatgtgtgcatctctgccatgaagtcacagtcattagcaacatacaaactaaggagcatgcttgtgtgccaataaagctttatcaacaacaataacaacaacaaaaagaaagagagagagagagagagagagagagagagagaaggaggggcgggccagatttgtcctatgagctcaagtgtaccgagtattgagtggagccttgtttgataggctgtttgctggctgccaagcattatagaaatctgatttcctgagtgttgattggccagaagctgtcatgtcagatactaatgcataaagttgctaagctacaggttaaggttttgctgctcttgtagccagctttctttccaacatcagtatcttctttctcgcttcattatgtgtgtgtgttcttgtttgtgggtgtttgcatgagtatgcacattgaggccagaggtcaactctccaccttatttgttgagacagggtctctcactgaacctggtgctcaccaattagaaccaagctggctagacaacaaggatcctcttgtctccccctccctagcactgggttacaggcacatgccatcccaagcctctggctcttttatgtgagttcccagggatcgaaccaaagtcctcacacctacatggcacgtactttactaactgaggcatctctccagcctggaaattcttcctcctgctgatgctacagactttgagtcatattctcctctaaagccattttactgtcctgctgggtccctctttgacaagccaaatgagtctttgacacacactgtatttgtatgagttacgttgaagaatatgacccgaacctgacagaggtgggtgggagatagcctgaggttgcaggatggggacatctgcccgtgcagagagggagagcagcagctgctgttcgtggatgttttcagaagagggaaccagagagcagggggtagccatctttagaggcttccagaagcagtaaagcagagagcaggtgctcatggaggcttccagaagtaggagcaagaaagtagaggcaattaaggaagcttctagaagggactgacagttgcctagagaaggcaggaggaggagcagacgtgtttgaaccatattggagaactttcatggacagaggtgcctgaggttatgtggtgacttcaggtaacaacaagcagagatttggggaacatggtaggcagagccagacagtgagatagtacccactggtcctggcagtcacctgtcccacctccaactcagagacatgcagaaaggggagggaaaggtcagggatgtgtgaccatggctcacacctcagtcatagtccattgtcccagttgacttgcttagagccctgaaatcctaggttgaactcagcagaatggaagaccaatagcaaaccagacatccctccatagtgtgtagtgcacacaccagctatggggcaacagcaatgtgggggaactgcaaatgaaagaccttcatcttcttctcacaacactggcagactcaggggagaaatacgtagggacccatggtcctgtcctgctggctttggccctgatagcatgaagcttgatctttgttgatggagtaacaggctcctgtgctcaatgacaatagctcacttgagctgcctatctcccagtcttgctgcctttcaatggccagccttgcctcatcctctcctctgagttgaagctcaaagggttgccacttctcttccaatccatttggtcacatgacaggatggccctgagttctagagccaccaccctgatccatgcagcccctgtggcagcatacatggcaggtgacacctgaccaggtccttactggggccatctccagggtcagagaagcacctagaaccaccttgagccaagatggaagacagacagagtcaaacgtgctgggcatggaggctgaggaggccgtagaggatacctaggactagccttcattcaaggagggtttgtgaagctgggcctggagagcagagacaggcagggaaagcattcagtcaggctgtggagactcggaggatcaattaaactctgtgaacatcctctgcttcttcacttagccacagaagaccagtgaaataaaagatatagtggtggccctctctgcagagctcaggtggcaggagcagaggctagacctccagagctatcaagattcaagggggatgtgagcactctcctgttgcagccttgcaagtggccatctctctctctttattgccccgtttcagctgccttgttcactcgcagaatcccagctgctcattagccactctgacctctggctctttctctaccgggtgtttctggccagcatcccattttaagtgctaaaacttgaggtgagattcacagaacactaatttcgccattttaaagaggacaattcctaaggttgtagattccgaatgtatttctacctctttcaaatgagtctcagcacctgagacttgtctccaagagctcttgctcccctcccaccccaacccttttccaccctacccctgctcccctcccaccccacgcccctcccatcctatcccacccctgcttctctcacaccccaacccctttccactgaacactgctaccccatcccccggcatttcaaaaaagagtctcttatgctctgtggatttggggacaggcttctttcacccagcacagtgtttctgaagtctgttcacctaaaagcaaacgccagtgccagtgtcccatgcctcatcatggtgaagtatgctccttgttcatctggagatatgtgtcttatttttacccttgagctgtactgcacagagcactgtgaactggtgtgtacaagtgcctttaggtgtatgaaagtgaatacagctgtgtgaagcttcacataagtgtatggaggagcatataggtgtgtgcaggtatgtacacatatgctactgtatatatagatatataattgtatgctactgtggatacatacatatatacaggtgtgtatgggcacatacatgcatgcatgctgttagtcatgttcagataaatacaggtgtgtgcaagtgcatacagctgtttgaaggtatttacatggtatgcagatctatacacagcttttgaagtacatgttactatgtacatgtgcatgaatagacatacatatacaagcacaggtattgtgggtatactcatgtgtgcacagatgtgagcagtcatattcaggtgaacacaggtgtgtgcagataccagtgtgtacacatgtgcaggtgcattcaggtgtgtgccttagtgtatgggatgtggtgtccgcctcggtcccctcccagatctgcagtgctttttctgctttaatctggtctacccacatctcaggctgcctctgcttgtcttcaggaagcaggctgctagcattcttgcttgctagttctccgcgtccttcatcctttgcatcaactctgcatcttaccaaggttgccaccccacatacaacacccccacccccagtggcttgcccacctgccaactcagtctactctgtgaacttgatgaacacaaggcctgactggtcatttaagtcacttacagagtattaaatgccaggacagggctgattctggctgaagtgactgtcagcccaccctctgtttgtgcccccatgatccctgggatcacacagaccactcaaggagccacagactggaggacacagtggtgtcccctgtgggttctgtgtgagacagtccagggtggcatcaacagggtaggtgaagatgtggctgacttgcccaggcaggtcacgggaagtgtgagtgtccaactactaactgagtgagccatgggacatgttctcagaaggagaggagaatgttaggggagtcctagggacaacccaatggggcctcacaggccaacttggaaaggacaagtgtctgtagacaatcctcagactagctctgccgtgaggtgcttgtgtgtgtgtgtgtgtgtgtgtgtgtgtgtgcatgtgttcatgtgtgtgcatgtgtttgtgtgtatatgtgtttgtgtgtgttcatttgtttgtgtacacatgagtgtgcatgtgcttaggttcatctgtgtgagcatacatctgagggtgcatgtccatgtgtgtgtatgtgcatatgttcatgtgtgtacatgtgtttgtgtgtatatgtgtttgttcatttgtttgtgtacacatgagtgtgcatgtgcttaggttcatctgtgtgagcatacatctgagggtgcatgtccatgtccgtgtgtgtgtgtgtgtgtgtgtgtgtgtgcacgctcatatgagtatgcctatgttaaccnnnnnnnnnnnnnnnnnnnnnnnnnnnnnnnnnnnnnnnnnnnnnnnnnnnnnnnnnnnnnnnnnnagagaaaaaagagagagccttgttttgttttgagacagtcattggtctcattgaatcagctggactgactcaccagagagacccaagaatctgtctgtctccatctgctaagctcaagaattgcacatgtgtgccacaatgactggcttaaaaatatattgtgtgcatgtgaatgtgtatgtttatgtgtatgtgtgtctgtatggataaatgagtgtagtacctgtagcagccagaagagggtgacagatttcctggagctggcattccaggggtataagctgcctgactgtggatgttgggcactgatctcaggtccgctgcaaggcaccgcatgctcttaacctctcagctatgtctctaggatcatgtatgattctggggatcagtctcaagtccccatgcttgtgtggcaggtgctatactggttgggccatccggccagctcccagggtactttgtagagaagaaacaaggcctgcatgctctgatgttaagcagagactcagccttttttgtaaaatggtacaaggccattggagcaagtatgctatatgcttggggaggaaaaggccaggtggtcccctgaagccagcaagtgctataaatggctctggaccccagtgaggaggacatctgtgccaggacttcatcagtgcgcaccatgggatcctggcagagtcttcctctgagcctctcttacttgtcaggtgagaggacaaagcactgtggatgctcctctttccatcacccaaatctaagccgcagaaccagccctcctgaggccaacttgttgactgaattttgaaataaaaccctcccagatgttgtgtgtgctgagaataacaggagcccgtgtctccatggcaggagaggtgtgtgtcaggaatcagtacctcccagcagaggctcagtccatcataccaggtagatgcatgcaggacactaggcagccttggtccctgtggtgagcccagtccatctcaggatctctctccacaggttggtgccatcggggacgaggaggagtgggttaccctctatgaggaggagaatgagcccgatgcccagatgttggagataccaaacctcacaccctacacacactacaggtgagaaccatgggtgggaagcaagtgcagatgaatgtgtttgccgtatgagaaaccagatggcatatggaaattaggattctcaagtagagagccgggagacggttcagctggtgagtgcttgatctacaagtgtgaggatctgagtttggattcccaggaacctgcctggtggccctggcacgtggctataatcccagcactgggcttgttagccggtcaatctagttaaagtgtctaggtccaggtttagtgagagaccctgtctcaaaaaataaagtggagaatgatgaagaaagacaccccaacctctggattccatatgtgcacccatgttggtacatcagaatacacagacatgcacacacacacaacacaacacacatacacatgcacactcacataaacacaatacatgcacacacacaaacacaacacacacacacacatataccacacacacacaaaacacacgtgcacacacaatcacacaaacacaatacgcacaatacactacacatacacacagttataggaaattccatatgtaacaataacagtacatacacaaaggccttaagcaagatgcacagtttgagttttgttccaattcatggttagcgtctaggctgaccacgtgtttccatcaaagcatacataccatggaaaagactcactattgcagccgtgaaataaccaggaaccgcaggccgcagactcctgacaaagcagatgtcccaggcactccgttctgcttcccccttccgtgacccaggagttattcttctcactaatcaagtgcttaacatggcatttaacctttcgctcctggatcctgctgcctaccctgacagtaagtccccggccttcaccaaggggagtgtgatcatgagctgttagcaatgctatcagttcccgtaacatcagcgcgagagatgaaatttccagttagcaccagatgttgagtttgataatgtcattgttctgccaggatggatacattctgtgtaatcgggggaacgagggagtaaggacaagcaattcaaagactgaaaggtgaaattacatcttcatgaaaagcatttattcagtacaataccaaagttggacatttttttaaagactaatgagttgtttttcattgtgtttatctgagtactcttcccaagcttatagcagataagtcaagatacaatataatcaatcctcaaaaggaaaacatgccatttcagtgagccactaggactcaggacttggcatgggaagtcacatgcagctgtataattaacccaacaaccagaaacctccataaggaagcaatgtccctgtcttaaagtcattaatttaggagatctctgagacaaccattatgtgtccttgcttaggttttttgctatatttaaattcagttcaaataattattgaggaagaaggcatggccagatatggtgcaaacctgttataccagctactgcagaggctaaggcaggaggattataatttcaagaccttcctgggctacagagtgagttcaaagtcagaccaagcaatatatcaaggctctgtctcagaagtttaaaaagagctgaaagcatggctcaacaatagagcccctgcctagaatcccccagtgaggggctgggggtgtggctcagtggtagagcccctgcctagaatcccccagtgagggtgtttgcttagcatactcaaggcccttgctttctaaggaaagtagagatcagttctgattaattggaggtctcatgtgcacttttcactgtgctacatgctagaatagatatggactacatcaatgcccttggccattcaaaatactggacttcaaaacagtgtctggtgacaacattgtgacgtttggttctatggaaggacctcaattctctttgcttaccctgaacttgagtcagccaacagcacttaaacttaacttctacccattgtctctgccaaatcagcttcacctgggaactaaatcagcctgagtcacatgagaccattttctgaaggcttttaaggaaaagcacatcttgtttttctgttgctgtcataaaattcccagagaataagagcttaaggaaggaagggtttgttctgattctcaggtcaaggatgtggaccatggtagccagaagctaatccagcaggagagggaggcggctgctcacatagcatctaccagcaggggacagggagctatgatggcctgctgcttgctctccttctccctgtacacagtccaaaatcccaaatagggaatggtgccacccacagtgagcaggtcttcccacctcaatgaatctattcaagatagtccctgcaggcatgcccagaggcctgtcttccagatgactctatattctgtcaaattgacagttaacactacccatcaaggaggacatagatgggatctatattcttcaccatcacaattaggtgtccttgagtgaaggccattgtggcactgaaaggcacacatgcaaggagcacccaaggagaccctgatcttttctgttgccttttgctttggaataatagcagttgatgcttttacctccaggtttcgaatgaggcaagtgaacatcgtgggtcccagccccttcagccagtcatccagggtcatccagaccctacaggccccacctgatgtggctccaaccagcctcactgtccgaacagccagtgagaccagcctgaggctacgctgggtggtaagttaggggctatggtggaagccactagtcaaggtttgctggggaatcagagcttagctgtaccacattcaggcggttttcctcatcaaagctaatcccattattagaccacaaagtattacattgcacgattagtgtaagatctaagagcagccctggatttcttattaattggtagcattgcttgttctcttcttggagctctgagtgctcttttcgggggagaacacagagagtgctaagtgcaggatctgtaagtcttaagcttggtcaacacagaaccaatactcgatatttgtaagagagccagtccagtgtttaatcagaacatttctccctcaaaattaaaccaaactgcattaaaggaaattatttctggcaaaagtcacgaaaagaattttgttgaattgacaggagaaaagttttaggaaaggtagatcagaaagttgtagggatgcggctgggaagatgtggctcagtatgaaaagcccctattgtccaagcacaaagacctgagttcagattccccagcacccatgtataaaggcagtgaggagtgaggacaggagaatccctagagcttgctgaacagctagtcctatcacatctgtactacaatggccattgtgatatacaaagatgcatgaggagtgcccagggaggccttcatctcttctgttgccttttgctttggagttggtgagctccagatttagtgagagaccctgtctcaaaaagtacaatgaagagtggtagataaagacatccaacatcaacctctggtcctcacaaacacatggatgtgaacatgtagacgtgtatgcaacccagtgtgtgcactgcgcatgcactagaaagttctaagaaacatgctctccatgaagttagacccataggatgggtttattcttgacgaccttcaaagctggcagttatggtatccactcatgccagcctgtctttcattgccagcctctgcctgattcccagtacaatgggaaccctgagtctgtgggctacagggtgaagtattggcgttctgaccaaccatcgtcagctctggcccaagttgtcagtgaccgtctggagagggagctgaccatcgaggaactggaggagtggacagagtacgagttgcggatgcaggccttcaacgccattggggctgggccctggagtgagctggtgcggggccgcacgcgggagtcaggtgagagggaggtaatgcaggtatggagacaaggtcccctctgtgtctctgtagaaatggtgtttggtggccttggatttccatgtccctgggtaacagagtctccccatgtctctcacctgtgtctgagcaccaaagcagtccaggctttgatgttaagcaaagctttatatcatctcttgtagtgttttgttttgttttgtttttgtttttgctttccagttgctgtgataaaacacactggtaaaaataacttaagggacaaaggtattatttgatttacagtttggtagaaaaagcatggcaacaggagcattaggcagctggttacattttatccatagctggccatactgtatccacagttggctacattgtacccacagttggttccattgtatctgcagttggctacattgtctccacagttgggaagaagagggcaatgaatgctgctgctcagcttgctttcttcttcaaactccatccaggaccccaggagagataatgatgctacctcctaagtggcccttccttcctcccttagttaacacactcaagataactcctcatagacatggccagagactaacatactctagataatccttcatagatgtgcctaggcacttgactcctaggtgcttccagagcctgtcaaatcaataacctatattaaccatcacctactcacagctgttcctttagatttaaacaggtgctggtcttaattttatgatttttaaagttaatgataacgttcactatcaacgataaaaaatcaagaagcagaaatttcctatgagatgcctttaatataccaggcatcagaccctgttcttcatgaataaatgtatacagcatgttcacgggtctagctgcagtaagaagtgggcccctgaatggctcaatacagtggcagttggtgtctcattcatttggatctgagatgggaatcctgtttgttggtggctaccttctactgtgtcattcaagaatccaggctctgatataccatggaattggtcacagagctgggattacaggcacacacctgccatgctcagtatacacactcccctggctgagccacatcccagacccaagtaatgctctgattacacagtatatgtttgggaacccagcaatgcctcagtgggcattcctgcaggatcaccattgtggtactggtgtacctctatggagaccccaatttttaaagtagggattccaagaccaatcagagctgtcttccaaatgtagcttttattgtatcagcaagaaaagacacagactcactcggctgtgatcatgtggatgccttaaaaccctttcatcttcctcagccaagtctgtgtgacaaggaagggacctggagacacttttaaagtatagttttaaatccattaatagtcagaccagtaaaatgtttctttgaagaaacaaaactttgcatacaaaactagaaagccatggataaaaatttttgttttttttttaacttatcaacaggcacaaaagaaaaacagaaaaaaaaatcaccatagcaacaggagctatgctggagtagccactgtggatcttccctaggtgtttgcttgttcatgtgtgtgcatgtccatgtgtacaggcacaggtacacatgtgtgcatgcacatgatggaggccagaggtcaacctcctttgagacaaggtctcttgttgacatggaacctgtcaattaggctggactgactggccatcaagcactaaggatccttctgcctcagcttccccagtacggggattacaattgagagtcaccacacctggttttcccccctgcgcatagtgtgtttagcctgcatatatgtcttgtatgcctggtacatgctgagtccagaagagggcatcagagcccctggaactgtagttataggcagctttaaactgctttgtgggtgctgagaactgaacctgaatcctctggaagagcagccaatgctcttaactgctgagccatctttctacctccctgctttaaaacaaaaaatgaaaacaaaaaacaaaaaaaaaacaaagcaaaacaaacaaacaaacaaaaaaacacaagtactgagactcaaactcaggccctcctgagtgtaaggcaagcattttactgtccaagccatcccctcagctactctcaatacccatgcagggacagaggggccagcctggaatccaaggatgctaggggagaacccaacatcctctttggagacagtgctcttctagaggggaccaagaatgcctgccactgagatccacctgtgtctgccttggcagcgtagaaaacagatgagcccagcctgtgcctgtgttgggtctgggttcttatatgtgctgtatatgtgtgatctggatgcttccagaagagaaattaatgtacaagtctgactgcagaaccccaaagcacaaagaacaacaacaaaaaggtagatcaatcaggccccatcgaaattaaagtgtcagggctttaaatagaaatataggaaatatataggaaatgaaaagaacctcaactggaggatacttctccgagcgctatgtctgacaaagtgttcagctataaatatccaacacctcttccttcacaatgaaaaggcaaatgatcctattaagaatggagcaaatgcctgaacagacagttctccagagacagagacaaatggctaataggcacgtggggagggactcagcatcgttagccaggaaggagatgcaaatccaagtcgtaaggagatgccacgttatacccataggaaggtcaaaattgaaaacacagcagagcgaatgtttgcaaggtgtggaggattcagagcttcatataccgggcattgtccaaaatctgaaacagactcaccacccaacacagctagcacactcttaggcatacccttatcttgtggtgacagagtatgtgataggaagcaacttatggggaggaaggtctggctacagctctcagtcctggccacagttgctgtggcagggagggtaggcaacaggaatgtgatggagatgcaaagaaggttcagggaatgatgagcactagctctcagctcacttcctcctcttagacggtcgagaacatagcccagggaacatgctacccaccttcagcctgggcctcctcgcctctgccaacctaagagagtccctcacagccatggacaaaggctaatcaagacgtccttcacaagtgtgccccagggtctcatgggtgattgtaaatcctgtcaggctgacagttgatcgggtaatcaaacagtcttccctgagacttaaaattaatgtcaccagggccagccagatggctcatcaggcaaaagcctaacaacctgagttcaatccccaggactcatagactagagagacccaattcctgcaggttgccttctgacctccacatgcttgctacagtatgcggagtcccacccacatgcatgtacataaccccaccatacccacgcgcacacacatgcacaagttaatgtaataatctcacagtcccacgtggaggctaaaaacaaaaccaaacattttgaaccacatttaaatgacatgtaataaataatagcttgaagcatggtctaacggtctgtgacaatctgtgacatactatataatggtaaatgggacttgaaaagaggggtcgcatagggagcagtgataaacagcagggaaaactgtcctgcagagaaaaacaggtggagaaggaagaaataagcaagctgggtcattttattttgataaaagggaagtttctaagaatgtatcaagacttaagataaattgaaaagaaagtcgaatataccttaggacagataatgggtacaattattcttctttacaccttcaaaaaaaagggggtacgctttgtccaagggggatttgaatccacagaatctagcaatatgtcatttcctgttcttaacagccttacctggcaggttctctcctagtgggaaactgcgagattcaaagcccagcactaagtcaccaggctaccttggcttttttgggacacagctgggcttcctgtgagtgaatgcttacataaccacgtctccgaaaatcaacagtggtttgtgggtctgtagtgagaagtaggcacttagagctgccaagattgaccccacaggaaacaggtaggggtccaagaggtgaccaattgggttgctatgacgatgtcctctctctctctccagacagagacagttttcagaacagaacacaaatgtaatatccatacaatacatttggggttgcagtcttattttaatcaagtcagaaatttggtctgataaatagcatgcttccaggctggtaacaatagtaccttctttgttcttagtgatccaaggtactgttttattgccttttaaaaattaaaataaggacctatgtaaatagttttctagtcaaggctgtagtggcatatataggtcccgtgagagcccctgcaggtagaccacagcaagacatggctgcaaagtgtgtgatacagacaagccctttgcctctgagaagtcagtcgagtcatcaatgactgttgcactaacattttttagggaaacctgaacaaatggctgctcaccccagttagtgcaccaaccatacaccaaagtgacgattacccaaggccaccttagggaaccagtgagattaatgggtttccttacagcaccagtgaagggtcactgagagaatcatgggtgacccaaagtagctgtgttgccacaagtgcccaccccatcatggatgatgacttcaacagagtccctgtttcagtcagctttcaacttccaatataacctcgcatctcccatgatgccttgcagttgaggaaaggtaggagagagtaatggctggatcttaggtgggagttcctatggctttcccttcccttcttccaacttgaaaatatcaatagctccatcacccaattgatctagctccctgtaactgtctatattatcaatttgatctagaatcacttaggaggcaagccactgggtatacctgtgagggattatctagattaagttaactgcagtgggaagacacaccctgagtgtgggcggcaccattccctaggctagggtcctagactgaataaaaaggagaaagtgaaccgagtaccaggatctctcagcttcctgactatggatgccatgcgaggggctgcctcatgctcctaccgccattgcctgccccattgtcatggactgtgtaccctcaaactgtgagccaaaaccaattcttcctcccttaagttgcttttattgggatattttatcacatcaatagaaaccaacatgctccctcattgttaggatggaatgatcacattataaggcagtggtccttgcctgtgacatgtgtgccctcatacacatctgtgtcatctcactagatgaataagtaaaagcatgactttcaactgccatgtctagggagaagtttcatcttctagtcatgctgactgccaattattgccctttcaaacatcagtaggctcactgagctccatcctcagaggtgtatgcatatagtgttcttatttggggcatcacagacccatcctggtcagggatctaaggctgagtgattaggagagggtatctaggatcaggtatgaggtatgtaggagggaagggtaagaggccgtgtctgtggtgctggacagaaagctagccattctcggggtggatgcatagtgacttctaccatgacttttcctccagaaagattcctgtggctggagaaagggtcaactgtggttgccaccccagacccagacccaatgtcatccaacagcttgctctgttagactatgacttgaatggcatctcccttcctcccttcccacttctcttataatatacactgctggctataaactcctcctagtcaagctcaacaattgtctagggcctttatgagtaatgctaatttgtgtgaaaatttttattgggggagacagctcatgtggtaaagtgtttgctttggcagcttaaggacccaagttcaaactccagaactgagataaaaatgccagacatggcagtgtgtgcctgtaaatccagtgatagggagatggatatgagaggttccctgggcctcactgtccagtccacctagttaagccatcaagccccaggtaaaagtgagagaacccacctcagatacaacaagatggacatgtcctggggagtactacccaaagttggtctccagcttatatacacacacatgtacaaatggaaacatactcgtgcacatgtgtacacataaacagatgtgaaaatagaaaaactgtataatcttgtggcagtgcctcccagatggcagcttgagtaatgagcatgtttctcatagctgtggaagcctgagttcgggactaggtgtctaggggcctgcaccctacgggggctggggggctgtcctggatcttccttagcagatccacggcctctgctgctttcttggctcatgcttgcatctctgtgatcttcctgtagcactgtccttgcatgcctgtagtgtccgcaaagctttcttgcctaccccacacagcactgcagagacatatggtcaagccctgtcatacagcagagatactatggccttgaaatgtgccctccttcttcagcctggaagtcctgggacaaggtgtgtcctttaggcccaagtccaggggagccttctgctctgtttagctactccctaaagaatacatctaatgatcaattaagtactctcctggatccatcctttcctgtgtggacaggctttgacatgttaatgggtccataaacaaaaaattgaaaatttataagagtgtccaacattttgacattgggatatgctattgccatctacatgtgttggactatattcatatttattataggatacatgtgtcccacaggccacagattagacagaatataaaatacttgtctgtaaagttttgttgctgtctatattacattgtatctgattcttggcacacacatatcaagacatctggttccagcaaagaaaactaactgagacaaaattgcctaaatgtaagagaattgtgttacatacacacaggtcaaaaactgcaaggactgcctcctaggcaattccataacaaaacagtcatttaaatgaaatagaatgagaaagggggagggatgtttgaggccagcctgggctacatagggagttgcaggccagattggtatatagcaagtaccatctcatgatcagatatatattaactctgggatgatggctccatcagtaaagtgcttgtaagcataaggacctgagtcagaaccgcaaaccccatgttgacagctagatgtagttcatgcttgtaattccagagctggggaggtagagacaggtggatggggctcattggccaactggccagttaacctagcctaatctgtgagccccaggccattgacagaccttgtttcaagacctaaagtatctaaggaatagaactcagggttgacctctggtctctgtatgcatgtctgcatatgcactgaagtgtacacacatacagagagagacagagagacagagagagatgcatacctacaaacccacagacacacatacacatttacacaagatacatacacatggattgcatgcatacttacacacacacacacacacacacacacaccacaataaatagaatgaaataaagttttccttagccttacatttccaggcccagggctgcgacccaatagtagagttcttgccgagcatgtgtgagcccccaggatctatccccagtactgaaaacacagaagagacaaacaaccaagtagatccaactcagttctctgtttatctgcagaaaggagtggatacccctgcttccactgatcatgtgaaattaaacacaattagcaatctaaggcatacatgggtactaggccaggctcccctggccctcccctcatatgcagcaacataatccctgaggtccatccctctgttcaccaccccaccccaccactgcccacctcctgtgtccaaccctcatggacctccatgtttagctagtgagctagaatccatctgaaattgaggaattccaattcaaggtaaaagcctgcagctattattatccgaaacagacggagagcattttcttgctggccagactcaggtagaattgagttctaaatacccaggaattatggaatttgttgctcatattaaagagatttacatatgtactgtgcacctgcaggctcatctgatctaccctgaactctcagaatcactgctgtttcaaggacagattgagtggtgtgtgtgtgtgtatgtgtgtgtgtgtgtgtgtgagagagagagagagagagagagagggagagagagagagagagagagagagagagagagagagagagatacatgcatgtgttgtacatgtgtgcaggggtgcatgagtatggtgtgtatatgcacatgcatttacatgtgtatgatatgtatgtgtgcgtgtgtgtcacacacaactcgcacgtatgagtgtaaatggccctctgttcatagaaggcaagagacagttgacactaatacagggtcattgtgtggcatgttcttttgcagttccttcagcagctcctgaaaatgtgtctgcagaggctgtcagctccacccagatcctactgacttgggcttcagttcctgagcaggaccagaatgggctcatcctaggctacaaggtgcgtgtttatggtgactttgctcacctttggggctggtagtaaagtgccacagatctgtcactcgaggaaaaaaagattcctaactttattagctgtcttgtctgggaaagacaggctaggagaagtgttttctggccatcagtcaggaggcaaatacaagcaggaccctgaccagcaagccaggtcccagctgaggcaccctgggcccttggaccatgatggatgcagcttctgcctccggctttgtgaaaaagcatgactgtggtgatcacttctcagagttgctgtgagaaattgggggctgtatgagaagtggcccctgctacttcagagtgctgatttgtggtgggcctaggcaggactgacttctgctggagttggaccttcctagcttctctgggtcccatcctctaagctgctccctagattctttaaaatctcctatttctttctcctctgtcaaaggtgaccaatagagttcccttgctctgtctataactctagtctcccaagtgacacagtaagcttctctgcatctggtcactaatgctatactgctctcatgggatgattggctggactggagcaatagagcactggcctagaatcccccagggaggggctgggggcgtggctcagtggtagagcccctgcctagaatcccccagggaggggctgggggcgtggctcagtggtagagcccctgcctagaatccctcagtgagggggctgggggcgtggctcagaggtagagcccctgcctagaatcccccagtgaggggctgggggcgtggctcagtggtagagcccctgcctagaatcccccagtgagggactggggcgtggctcagtggtagagcccctgcctagaatcccccagtgaggggctgggggtgtggctcagtggtagagcacctgcctagaatcccccagtgaggggctggggtggggtttagtgaccaattgcttgttccgtattcatgagcccctgggttcaatccctagtaaaataagaaagtcccttcgacatatcatcagtggattctaagcgttcccttctcttgtctttcagtaactttttttcctgctttggggactaggagggggcaactattaactttcagacaggatctcacactgtagctcaggttagcctggaactcactatgtaacaccagctgaccttgaattcatagcagtcttccagcctggtctttcaaaatgctgggatgacaagcttacccactaaacccagctgcctttctgtcattaaatccccattgcttttcttctaacctgtgctcatatgcattccatctctgcaaatattctaatggctcccttctggatctgtggtaggtgtataccacaaagacacgacactggcagtctcctgttacatggcagtcctgttagcaggttcggtggacaaagctccatgccactctcctggctcccatagtgaaatggttcctgggctgttttcagttgtctccccagtggccctctcttttttggctcttggatcacttaccttggagagagttcataagggatgaacgtagaaagaagaccaaggagagaaataggaggaggtcctagagaagccagctcaggccatccctgttaggggcgagttttgggtgtatgtggggaagagcagacctgcttgagcaggaaccccaagttttttgaatcaagggacttcttggagccacaagctctgtttataggaagcaagaggtctgtgcccagtagcaagcccatgcttcagtgggagcatttggcatggctagagttgagagcttcagcccttgccaaattgtgctcaggcagccaaatcaccgagcgacgggcagagctgttgactccagccagtctcctggagtagagttgcctcacagccatcttcccccttgatgccagtggttagaaatgagatccaaaacttctttagcacagctgccctcacgaagaaaacccagttggctgggtggtccttgccagtctgttctgagctggtgccctgtgcacagagagtccccttccaagcacacactgagctgtaaccatctgcatgcgatgcttcaggttctatactgtgccaaagacctggacccagagcccagaagccacgtggtacgagggaaccacacgcagtctgcgctgctggctggcctgcgaaagttcgtggtctatgagctccaagtgctggcgttcacacggatcgggaatggggtccccagctcacctctcatcctggagcgcaccaaagatgacagtaagtgcatggctggtcatgctgccttctggcttagttttccagtccaaacaattcagattgtggttgcttttaatgtaaattttcaaccactttttttttctagttaatggaaacacaacaaaaattgtttccagtcactgggcatttatgtggccaatttgagcctggagaggatttttacagcctgattatggactatgcggaatctcaatgctaactatgctgtgggtgggggctactgagggttggctaggttgtgaaccatgagtccatccacttattaacagctctacagatctagataaaactcctctctggacccctgtgcccatcctcctggagatggtgggtctcaccatttgcattcagattgttaattataagtttttgcacagaaagcagcatgtttgacagcacccaggggtccccaggatccggtgcttccaggtttgagtaacaagcacatcttgctggctttgtttttatggaagtctaaatcatcagtaaatatgtttttccactttgcagatgtgagacacttaaaggttagccccttcccacgttcgttatttaacaggccataatgaatatgtcagggggaaaatcctgatctgcctaaacgcccacctcgggatcagaagtgtctgatgggatagaaacaacaatgtggttgtttaagcatcttcttggaatggataatgagctgcagcgtgttctacttactccgtggagagagccctgtctccctcattcacacagcctctggatctggccttggctctatactgcttacctctgtcattgctgtgacccagtgcctgagtagtagcttgacagatggaaggttacagtttgagggtacagcccatcatggtggggaaggcatggtggcaggaaggaggcagctgctcacattgcaacaagagagaggtgaacgctggtgttcagctcactttcaccttattcagtcagtgaccccagcccacagacagtgtctgtcacatttaggatgaggctttccacttctgttagccaaatcttgaaaatctgtcgtggacatgaccagaggtctgtctcttacgtgattctggatcctgtcacattgacagtcgaaaccaccactgcttctgtggtgtgattccttcagctttctccaagacaagaggtagaagagaagtgcaggggaaatagtgactgggccttgttagctgcaagttgtactgatccttgcttccatttagtccttaaaaaaaaagaaaggagagacctttcagaaacagtctcaatgttcactgccattattccttctaaggacacatctagtcaggcagtgatttttttttcttttattgttgtgttatttatataaacacatcttctctcttcactttgacacaatccactcagcctcagggacagctcaggaggtcattgctatgtcacattggtgttataaattagtcctgacattcaagcctctggcctcccttgagcatttatctcacccatgtatgggtatcattacacacatccaaattcaccctcccagaatggacagttccccactttccgtttccacatcgatttgctccgtgctgatgcgcagaaatcgatccatgattaagtccagcaagaacttcttctcacactggccacacactaacttgcctagccgtttaagcaaatatattttatgagggctgagaccctattattcaatcgttccataaggcataacggcattttaaattatcggtgcactgaaccacacagaagaattattatatacatctgtgagcatccactcttaattttctaagacagggtgggggggtgggtgaggcaagtgtaggccaggaaggattaaagggttgtcaggtgcttcatcagtggttgggggtggggatggggctaaaggataacttgttgtattggttacttgtgttgtggctgtaaccaaatacctgacaaaggtaaggtgaggggcaaaggtttgcttcgctcacagtttgagggtacacagtccaacgtggcagtgggaacagggtgacaagagcatgaggtagctgtcacactgcatctgcaggcaggaagcagagagagacgcagcctgtgctcagcttgctttctccttcttattcaacccaggaccccatcccatgggatagggacacccacattccgagtgggtcttccacctcagttagcccaatttggaaagccctccacagacatggccagaggtgtgtctcctaggtgattctagaacacgtcatgttgacagtcagtattgaccatcacagttgccaaacacctgttctacaaacatcaaacccagcaaaggaatctggcctcgtattgacaaagcatttacttccaagtcacagctgactctcaggctagtgttgccatgagctgttctcttatgacctgtaagcgtagtttctgagcatggttttctaagtcagatggtcaggattcaaactaaagtgtgcttttcaaagtcattagggaggcacacggagccaatgggggtccagaagtccttcaccgaaaacacgggctgggggctagagtcagtggttgagagcactgactgctcttccaaaggtcctgagttcaatttccaacaaccacatagtggctcacaaccatttgtaaagatggatgccttctgctactgtgtctggaaacaattatagtgtagtcatataaataaaataaatctttaaaaaaaaagaaaagaaagaaaacatgaactggaaagataaaacaccttaactttccataaagtgcctactgaatgagtgtcaggacctaagttcaaatcccctaagacccacatcaaaagccaggtataaaataaaaaaataaggggctagagagatgactcagcagttaagaatgctggctgttcttccagaggacccgtattcaattcttagcatctatgttgggcagcttataactgctggtaactctagctccagcggatctaataccttcttctggtctccatgggcagctatacacatgcagcatatatcacagatctttacacaaaataaacaaacaaatattttttttaaaaggtaagtcaatttaggagacccacagcagccatcagagcacgaggccgtccacagaaccctatgtgactcctgtctcactttgccttccttcagccccaggtccccccgtgcggctggtgttccccgaagtaagacttactgcagtgcggattgtgtggcagcccccagaggagcccaatggtgtgattctgggtaaggaacattgtgtatgtgtgtgggggagggggtggcagtgaggaatggcagagagaaagggcaggagatttgctctcttctttctgggtgggtagacataaatcaagccggcagcagccagcatctcctggacaccgagcgagcatcctagacctcctttgttcccgagcagggcaccgaggctttctcctggaatgaaatttacattgtattaacccagaattccctccatctgtttgcagtccaaggcgagcccatttgtaatcagcctcccccaactttgggctgtgccaacgttgtttaggaaatggcaggctagtttttcatagcagatgctacctggctcttggaagcatcttctcccactatgaagcctgcaactgacccctggacaggagaagctgctgggagacaaagctctgataagattgacagaaagccagcagatggtgttttaaagcaccatcaataccttcatttatttatactctcacttagtcaaattaaaaactccatgtttgttacccttccctggtggaacataggactgagcgaggtccagtcgctctcaggtctcccatgggacctgtaggaagatagctagaggtgtattgcacatgacgaccgatacaatccacagtcactaactgtcctgctaaccagccttggatagaggttagggtgggtgaaatgctgctttggagctgagtcttggggcaggggacttccacagccctgggagcagggagggacctctgatggtttctgcctgagagtagagacagatccagagcatgggcaagtggcctgtgtgtgccagagagtgtgtgtcttagggttgccttgctgtgaagagacaccatgaccaaggcaactcttataaaggacaacatttaattgggactggcttacagtgtcccaggttcagtccattatcatcaagacaggaaccatagcagcatcaaggcaggcatggtgctggagaaggagcagagagttctacatcttgatcccaaaggcatccaggaagacatggagactgtcttctgcatactgccaggagggtctctcttactcagtgggtggagcttgagcatgggagccctccaaagcccacctataccatgacacacttcctccaacaagaccgcacctcctaatagtgccactccccatgcatggccaagtattcaaaccactacagtgttacacatggaaaaaatgagcatttcaagagtagggtcccagaatatggcgcaaagtacggttgcagacctgtcaccagtgacatccatccacctggtctccattcacaggaaactctgagctagtaggaaatttccagtgaaattcttcatctgaaatgatgggctggtgacaaacgtctctgctgtcaactgcttttgatcttgcctgtctaagacttggtttgaagatgtctcaatcagtagtgtttgctatgcaagcatgaggaccccggttggatcccctaaaacccatgaaaaggaaatttcaggcatggtagcatattcttgtaatcccagcatcatgaagatggatcccacgggctcactagccaggcagccttgccagattgtaacgtctctatcatagccctccaggccaatgagagaccctgcctcaaaagatgaaaggcatttgtttcgaaaacaaggtggttagcactggaggaaccacacctatggttgtcttcagaactatatgtgcacatacatatgcatgtccattttcatgcacacacacacatacctgaaaacccatgcatctctagcagcccagagacagagtcccaaaaggcatgtttgtgtggaacgtttgcctatctttaggataggcctgggtggccctgtatcctctactcaaggggtcaggggggcaatcttcactccttgaccttccattgtaggatggagccaccagatacaagtattgctgttagcaaagatctcctgaacctggtggccttgagattcctggtgctggcagccacaactgtggcagctttcgaagcccccattgaaatgagctctgactggaaaaggtcaagagccacatctggagtctgcaccataggctcaggctggggctggggaaatggcttcagagcaggtggccagtgcaaaggcaaaccgtgctgtaggaagagcctgccctcggcatgacaacggaccacagagcattatgaaacaaacagagctggatacccgattccccgtgagttgtctccagttgtccccagaaggccacaccaaaacaggtaacattttcagaggtgcaaaatagtagaattctggtctgtcccctggagtcccagaggcctaaagactgttttctatgaagaagtaggtgccttgagctccaccccatcccaagcctctggctttcatctgcagccctactgaccccagtcacagtcaactccctagtcctctcccttcatgtatcactgctctgggactgcatgctattatacatatgacctggtatacacatggatggtacagctctgcattgctaatcagtgcctcccatgcatatacagggtcggattcatacctggggtccttctgtaaaactcaaggaagcctcctcctatctgctgctgctctgctgctgctgctgctgctgctgctataattgaatgccagagactgtgtagtttgcaaagaataaaggtttactctccctaggttcacagtgcttctgcaaccagtaaactgctagaccctgcgattttaaaatgagcctagtgctccatgtggacagtgaggctgggtctagtgggattggcagcttcccataccccacaaggaaggatgacattttcagtgcagtattaaaggcaggtgattcaggaaagggggtgcatgcagtttctggggatggagggctaaggtggaatggctgcacctggggagtgccttgcttgttggtgaggaccctgctgaggtcacatggtaggggggtggcatgaatgagagtgaacaggacttttataggacctgcaaggtagtttactctgtaatcctcaaaattcacgttaaaaaaaaaaaaaaaagctaggcttggcggtgcacacttggagtccacacactagcttcaaagagaagagacaggaggatggcagggctcactgtccagccaccatcgcctacacagtgagctcccagccactgagagaccctgaagaataacaccatcaaggtacacttgcggacatgcatggacacatgtgcatgtatatacatacccacacacacacatacacacacatacatacacacacacacacacacacatgaaaaataaagtttaaaaaaataactaaataagacgacatttacaacagacccaccatccaggatctggctaacatggtaatgccttagcgtgtaagtgacttcacctgattgctcatggtccacctcagaaaggatccacctgtggaccccacctcccagcccctcactgatggactctgagtaggagctctggtggggatggtcaacctgcagcatgctcttctgcaagaatgccacccaccatccaagtgtctctagctggctgacaccctcctctctgcactcagagaggacacctctaactccaccgtctcactgtccagatggactgtcagctcacttctaaatctttgtcatttgctcttcaatgtgtctcgaagcattggttttgctgatcacagaagtgccataaagtgcgatttagtcagcagtaccatgccaggtcacatccgtcaggcctgggatggtgaggttctgtgaccagctatacaaatggaagggtgtgagggcagcacccctcacatgtccttgttgggagtgtcacctgtgtagcctctagagagccacacatggggaagatgagcagccattcttgtctctagacattgtgcccaaaggaaactctacagcagtagagttctcaacctgtgggtctccacctctttggaggtcacacatcagatattctgaataacaaatatttacattacaatgacagttatgaagtagcaacaaaataagtttatggttgggggacactacaaagtgaggaactatattgaagggtcacagcattgtgaatgttgaaaaccactgctctgtggggctgggaatgtagctcagatgacagagtactttcatgtgtgaaaccctggatgaactgggtggtggcacatgcctgtcatcccaggactcaggatgtggaggcaggaggatctgaaagtaagtaaatggttagcctcagctagttagtgagttcaaggctagcctgagctatgggagaccctgtctggaaaaataaataaataaaaaggaaacacacatatttacaaggctcttcattcaaacagatttccttatatagcaaaggaggcagctataagctgcagtttgcatggctagagtctcggggtgctattggtatttctcccagagtcttaggctctgcattacagcaaggcagagagcaaagtgggtgatggtgaagagtccagaagcatcactgcctagcctcagacctcagcctgccatctactgagtacatataaaaaaaaaaaatgcactcaggtccccaggcctcagtttccccatttatgcccctcttaacatgcaatgaaacactcagaaaaatgtctgccacagtcagtgcttgtgggggttggaatatgcttggcccaggagaagtgacatgattgggggtgtggccttgttggaatggaggaagtatgtcattgtgtaggcagtctttaaggtctcctagagctcaagctctgcccagtggagaagagagcctcctcctgaatgccctcagattaagatgtagcactcccagttcctccagccccatgtccgcctgcgtgctgccatgcttcccgccatgatgtaatggtctaaacctctgcaactataagccagccccaattacatgttttcctttaaatgtgttgccttggtcatggtgtctactcccatcaatgaaaacctaactgagacagtgctcagtaaacagagttcctaccacatttgctagcctgtcacttctggctggagggcctttgatcctgggccaggtcagatcaggtcataaatttactttgtgcatacggatggtgcactggattcccctgctctccacccaccactcttgttttgtgtgtctgtctgtctgtctgtctgtccatccatgggttttccagtacaagcacctgtgcacacacagagaccagaggagaaacctgagtatcctggtgttccactctctgttttattcccagtaactctggagccaggctgatggctagcaacctctagtgaccctcctttctctgtgtcccatagtgctgggcttacagtcatgcacatacagccagccatgcttgactttttctgtgggtaccggagatttgaactcgtgtcctcctgctgccacagcaagtgctctttcccactgcactgttttctcaactgagacctttgagtttgatgggaagtccaggtgggaccatcactgaaaatcacaaacacatagggaagaagtagatggtatttacttcaagcaccctgcattaaccagtattatagtgctgtaatacagtatctgtagtacaatagaactggggtgactatttactagagacaggctggggaatccaacagtggccatctgcatgctggagatgctgagagccagggagctggcagccccagagtctggatacttcagaagtcccagtctggtgcctgaggcctggaggattcctggagggccactggtcctcagttcatgttggaattctaaacaaattgggtttcaatgtcagcgaagggtggtagcaacaaaagagcagatgcacttaaaagcaaggagcaaaggcaggcaggcaaagcatagctttcccctacagtctctttgtatctgggctgctagaaggcactgcccactctggaagagtcctccctccccccttagttaattcttcctggaaatgccctcaaacctccattcagaggcatgtctcttagttgattccaaagacaagattaaccatcacacacaaatgctaagtcaggtggcaatactctgttaagtgggcagtgtggcctttgagcatttgggggttgtaatgacatctggtggatagcagatgctgtctgggggaccccgtaacctggatattattacagccaacacatcagaccacagatgctgtagggaaggaccaacagttcctaaagacccaggctcttgctgggatggaaaggaagctctctgattgcctgaatacctggaatggatgttcccaggagcccaggctgccagggcggccttctaagtgtggactcatctgcagcccactccttcccagtctatatggaagcatgctcttgcatttctcaaagagattaacagcgtgaaacagcaccagagtctggagggagaaaacacttgcttatttgtgtgataaatattttactctagagaactcagaacagttagaagcctcctttggggtttgtggaactacctgagtctagccacctgctcccaacttgctagactgctccacacacccttgaatacgttaaagtaggcgtcatgcacacactcttcaaaactgtgccacgccagactcagaccttagattctgctcctgtctccacccatcagaagaacccccagacagccaggaccttgaatggcttcttgttgttgttgttttgttttgatttgttttgttgagaaccctgatgtatcatttctgtgttcccaggcctcaagtagataagctttaaacctacagcagggattttcaggaacccttagaccgcttctgggttctctggggggagcggggctttatagcctccaaatagtcatcaaagcttaacaacactgtgtcccactgatggcctagctttggggacccaagcttcctcaggaagactaataccattgcttgtcggccatcagtacagcccacaaaaggtttgccttgaatgtcaagacaaaacccagacagctgttccagctctcggggtcagacttcaaggagtggaaacccttccaaggcttgaggctcgttgcctgtcttaccctgtcctctgtctgtctatcgttcctccagctgattttctaggcgtgggaagcgcattgggaagcccgcacaagcttctcattacacattttaatcttcccttcggatcgatgtccctcatgcttggccctgctctcttccatgcccttattatcataattcacccataaccttaaaaacagggcttctctcgagccacgttctcctcctcctcttgagtaagcgcattcattctttgcaaacacacaccgcagcctcctgaccctggctcgctgaaatcccactcgctaatgcttctgatccagccgcaaccataattacataagaagccttatcctcggaaatgctctcagctctgaacaccatccatcattattctctgaaaatgcaagaactattccacagctgcctctcccatccaggatgctcaggaaagagactgccgaggtcctgtgaatgagtctctttggcgtgtcagggtgaggtgtgggtgttaatttttatgttcagcacaccagggtgcaggtcccgctaatgatgccacatttattggagggaaaataataggaaggtacaaacagaagccggaggctgaggagttttctctcggtaatagctcagtgtggaaagtggattggagatagaaaataataacccagatttcctgcagttaaggacaaatgacattgtggtttccatatattatctactgagtctacacagtgactgtcccagataaatattcctctcgttctgtttcagagacagaagggccaggggttaagggtagccctgcagcaaaaaatcctcttctattcgagggaggggccctactgtgctagacaactacaaggattgttctaagaccaagtcctcggataaatggtgtactgtctgcagataacctgtgctccccatctacggactgaaaaatcatgtctagatgactgcctgtacctgatccagagtagacatttttatatgtggtggtcatgcagtatccctgtttgatcaccactaacatggggctttccttgagtttttaaaggacttcttaaatttctacttgtctgtatatctgtatctctctctctctctctctctctctctccctctctttgtgtgtttgtgtatgtttgggtgtgtgtgtgtgtgtgtatgtgtgtgtgtgtgtgtgcacacaggggacatcttgccctgttactactcaaaaacatggccagtctcactttcatacacaggctgaaatccaccatagaagacccaaggtttaaatggatatagcctagaataagaggtctctatatgtggtgccaaatgctatacattcattctctgtgtgtgcatttgtgtgcacctatgtgtggaggtaagctatatgtcaaatgtcatccctgggactgtgtccaccttgtctctttagcctggggcttgctgacttgaccagttgtctccacatgctcagaactggaataacaggcatgccgccacctaccacacccttggctttctatgtgggtgctagacttgaactcaggtcctcaggcttgaacagcaagtactttacgtattgagccttcttcccatcatgaatgttttcatcattcccagcgagaggagagacactgagagttacatagggtagagacatgcccaaggtaagcaaagaactggactaggatggaacccagatcactggctacctgctctctagtcagggactctggagagagatatgaggatctcacacagcccctcactgggggattctaggcaggggctccaccactgagccacgcccccagcccctccctggaggattctaggcaggtggtgtaccactgagatttctgtattttttttattcagatatacagtcttgctacattgccctagctagccttgaactcattctgtaggccaggctggcttaagctttcagtcatcctgcctcagcctcctgaatagctgtgacggtagactggttcaggggacctagatcatgccattttttttttttttaattaaagaaaggaccagcactcgggaggcagaggcaggcagatttctgagttcgaggccagcccggtctacaaagtgagttccaggacagccagggctatacagagaaaccctgtctcgaaaaaccaaaaaaaaaaaaaaaaaaaaaaaagaaagaaaaagaaaaaaaaaaaaagaaaggaaacttaaatctagaagtttacacctcctaaaatatactgataataaatactgattccatgactagagatactatttgtagtcagaagatcttacaactgtggggcttgagagatggctcagtggttaagaatgcttgcagctcttaaagaggctctgatttcagttctgagaacccaagttgggtggctcccaactgtaacctcagccccaggaaatcagacactctgttctggaccccaagagcacctgcacacatacctaccggtacctgcatacatacacattttaaaattacaatttttaaaaggacatcttgaacaagaaggccttcaacgtgtgtcattcccctggtcagtgaagaagcagaaagaggaaaatgtgtacttccatggaggatcccactttaaaattacctgttccatgctggactgttgcagagaatatttaattgcaatctggagcctctaccggccttgggtcattcggttccccgataaaagacacacaacttatattatttacaatagccttagtcagcactagagctgggcagcgatatctaccctctaaggtattagaatctactttcctatctgtaacccgagttattactcattatgtttcatctgggctgctcttaaccccaactggccagccctcatggccatgctttcttggctcctaacacatagtgtctttcttttcttccaccttcttcaccctctcctggtggtttcctcaggttccaaggctgggaacaccaaactccacctatctcaattctgctcagctatcagccgtaggcatctttatttgccaatcagaaataacttgagggcaaggtcacatagagtcatttgggtcttctgtagactctctcatctctggggaaaacaggccttgggggcccgcacttagcattacaatacctagcaacaaccaaaggtcaacactggactgcagtgagcacgcaccaggtgcagctaactcggtaggcctgacatggttggacatcacctgttttatggccaaggtaagaaagtgttagttccagcaactcaaggggctgggcccaggattctgtagaactaaggcagcatgggtggctaatagaaggacaggccctcagggggacaaaatcaaaaccaaataaaacaaaatcttatgacaaaatgactgcaggtgcaataaacagcccagtactccctggtgagggggcaaccatggcaacagcgtcaatcagctgtaaagagtggatacctggtgctcttgactgttttctgttcacaagtgttgatgcaaaacaacaacagactttgctctcacctcaaagtgaaatagtttattctggagcaaaatatgaaactatgggcgtggcccaggaacacggatttaggttatccccaattacacattccaatgtggtaacagtttacggggttctcctagcaacagagcaaagaaaatcctgagtcaggacggttttcagatgtgttggtgggaaccttgggtaggcaggttccagcagagcagagaagtcactgtcataggcctcagatgctctccgatgacacgcttagctttgggtatctgttgcaagtcaaggggttgttcgtacatttcagagggtttacataatcatcccaggctataaggcacagaggtaatcagtaaatgctatttaggggctgagctagcccaagatagtttgtctatagacctatgacttccagctgttgacaaacattgacaaacaatcttggagaacatttggcaagggggaggcttttttccttggggatgtcagttaacccatggagttgagaaatggccacaaggtaagtcctgtgcttgccctgtgcctatgaggtgcggcctcttgcctggagcacaggcagcccccaacagcctttgagatgtggcctgtggtacctccttcaagctcaagagacagagggtgtgtctgtggggatcgcttttcacatatctaacagtggggaacttacagagccaggttctgtctcagtcatacctcctctccagagctgtgaaacgctatttctgccaggaaagcctcacacagaggggattgcagagttcagggcctaagtaggtacatccaccgttagccattggctgtatgagatagctatgagtgtggcccacaaaatgtcttatgcttacttaagacattataaaaaagtttttattgtgttactgattttttttcaagctctcagaaatattgcttgttgtacacattctaccccatcgcccctacttcctctttcctcctcccttttcctctcatgggtcccctttaccccttatgtttgcatgtatggatgtatatatgatttcatgtatctatacaaagcctaagaactacaaacagtctctcgtttgtgagttctcagtatgatagatgactttcatgactatcttcaattaaatcctttttttttctggaaacaatattacctcaatataactccacacatgtccgttgcgtggagccagaccatggcttgggagttaacagcacttgcagagggcctgggtttgatctccagcaccacattgaataccttaaactgcctgtaactggatctggtgccctcttctggcggctgtggatgttacacacacttggtacacagactgctgaggaggagcatacacgtaaattaatttgtttttaatgtggccccataggcagtacatcttctttaatcatccctgtgctgccagatacctggattaatgccacagccacggctgtgtggatagtgccaggtgtaagacagatatgcaagtgtctttatcaatgtggaggctttagggtaaatgcctgggagtgttttagctgggcagtgactttccataaattgattgcacagtcctcaagcatgaactctgtatatgacagcttctatcaccgggttgaaaggttgaacattcttggaagcaagcaaaagccgagaggggctgtcctctttctggaagtgtagttggttcttttggaaaaaaaaaaaaaaaaaaaagtaaaccagacctggggcgtccatcatcactaaccttgggcaaactgtaacctttccagctgccttgcccctgtgtgtttgcccggctgggagccgctgctgttagcactcactggagtgagagtgtaaaaaccacgacgcctacacatggctgtcctgccactgtgccatcttctcatttggtgctgggtgtgcaagagtctctgaaggcctgagactgtgtcccctgggacatccaagctctgcttccccatgactgagttgggagaagagatagcctaggaggactggccagccatctctaggtttcagtccctggtcagtaagtaagaagaggacttggatcaactgccggaaacctcagaacacttggtctctatggcagggagaaaagctggtctatcagatacaagaagtggccataacggccattgagcagcctggggttagccccccatacacaccgaacatcactctgaggctgaggattgtgtcactggtcgatatggcaatgatagccaccctatcgatgactgtggtgactgggcctaaaggctcagtctgacctctgtgtgggtgtgtcttcctggtctccaatggaggactggaggggatgcaccatacagttgggggaatagcctggcagcttggagacccctagagccaaagcctagactaggaagaccaggagtagcagaagtgctgcctgagggcatgcaggggactgaccaagctgtgcactaggaagagccatgtctccacagcaggcgagcagctgccccatcctggtccctgcagcaggcctccactcaaagggcagagctgggagaccctgttcagcttgatgctttcctttgtcccctgcggagtcctcattgtttagcgtgaacatttgggttgtcattaattttttttttttacatgtcacagcaccccatccattctagttttaatcagaagcccgaccacacgtggtccgggaacccagaaggcagtctgccccatggcccacggttgggtctgggaaattggcaaggcttcttccgaagccagcaggcaggcatggggttgcttggttggagggatttgatcattaataacgtctgatcaaccgtgaccctttcataatcagggaactcagagagacacgcagagccagccaaaccctgccactttggagtttcggaaattaaggggtattcagctatttaacgtagagcctccaagctcaggaggcctgggtggctggaattgtggaagatgaggcaggaggaaactaggaagggggagtgaaaaatgcaagtataatcctgcctgccacaagcagtgtgaaatagcctgctccggacaggtctggcctctcctgctgtgttgaagggaagggctgcaccataggagggaaggccgaaggggatggaagagccagaggcacagggctcctgacaacctcccatggggagcagtgcggggatctggggcctagtggcattctctgagcgtgcagcatccagaggaaagatgaagctgtgttcacatcttgttcccgtgaaggatgaactgtgagacacatttcacagaggactgagctcagacagccggcactcatcgccagggctgtgacttccctatcaatacgcaccctgcagagctttggaaatcaggaaggagcagagagggcaagctttgggtttccaatctgggctgattatggggtgtaggttttctgggctgatgtgacttcttccctgactctgttcctggctcccacagggtaccagatcgcctaccgcctggccagcggtagtcctcacaccttcaccactgttgaggtgggtgccacggtgcggcaattcacagccacagagctggccccggagtctgcctacatcttcagactgtctgctaagacgagacagggttggggtgagcccctggaggccacagttatcactactgagaagagaggtaagcccccaggccctcatctgactgtagcctgaaggttacacaacgggtccccctcaaccccactcttcccccacggggcctagaagcctgagcaagacaggagggagctacacagatggcctttttcattttttaaagtgtgtgtggcttatttgtgtgtgtgtgtgtgtgtgtgtgtgtgtgtgatatttgtatgtatgtgggtgggtgggtgttcagtatgtgtgcagtactcatgcacatgcgtgtgcacctgtgtggatgccagaggtggggtatctttgccccaacattctccaccctattctttgagacaatgtttcattgagcctagagatagctatctgggctaggttggctagccagcaagccgccccccccccccggatccccagttaaagacataggccatggtgtctttaatacagctcctcgtgttgtggtgacacccaccagcaccattaaattatttttattgctacttcaaaactgtaaatgtgttgcttctatgaattttaatgtaaacgtctgtggtttctgatggtcttaggcgacccctgtggaagggttgtttagcccccaaagggtcttggctcacaggttgagaacctctagtttagtaagtgtgagttcttgaagtcactggctgctgtctgatgtttaagactgtgtccccctagtgggcacactcacagtaggtgttgtctgagtagctgttcccctggccactgtcctttagagacacctaccctgccccatgctcggggccaggtatgtggtgtaccttgtgtgtgtctggcccttccctaaccaaagcccagttgggaacattctgatgtcacagaagaggaggatgggaaactgaggcacctttatagaacttcaccagtgcagctgcctccgaccaccacaggccagctcctcctgtgagggtctgggtgggacctatctcagcaggcccttacccacaacctgagcctcacactagagcagcggttcccaaccttcctaatgttgcgaccctgaagtacagtccctcaggctgtgataaaccatataagtattccattgctacttcataactgcaattttgttagtgttatgaatcataatgtaaatatatgatatgtggggggcacaaccctcaggttgagaaacactgctctagaaccttccaccgaagcccagtgggcctctcttcagaagtcatgcctccaggcataggtggtatggcgatacctttcctgaagaggcataaaccaactgtgacaacatagggcacagctaacagactaatgtaaggattccaccaagactccacttggagaaccagacagtttattagatccacttaccgtgcacttacaagtatacaaatgacccctaaacagctgcatcacacatagtgatgacatcatggagtcacccctttagtcagccttctacttcctgtaaaatctagcatctaccaggatcacttgcagctaggtaggtggggtgaaggagagagtaatggctggaatctcaggttacggtcccgtgaccttcccatcctccatctactaaggagtgtcactagctccatcaccattaccatacatatagctaatgctatattattctgctcagttagttactatggctaccagtccaagaaaatctctactctaaaataacagtgttgtgcccaaaagagaaaaagccatacaagggaggctaccatcatagccagacccagtggtctgggaactgagccagaagggctcatgagaaataccctgagctcaaggctcaggactattaggccttgggaaaacccttccccactctttgcaatggcactggcttgggaggcccatgtgggacacttagcatagtgcctgggtcagctgagcggttctccctgtcctcaacatggctctcagggactgcactggtgtgatgtaaacgttcacccaacatgaatgagtgtcactgctgcatttgtgatgacatttattacaagatctaaagcaggccatctcaggaagcaaggagtcgaactcggaacgcttaaactaagtggaaggaggccagcatagagctccctcctatcttcctctggctgcctccaagtatcactgcctctgctcccatcccagctctcaccagagcctcccaaggtttcatcaggggagaaaccaagtctccatcataggagaagcctgctgggtgaagaatgggctatgctgccctgagacccactgtgcctgccttgtgcgctgacacagtaattcctcatctttgcagaatgagcaccagcagagagagccaggtctcaccctccataccctgaaccagcaagttcccagcaggtccgagatctatcagccttccccaactgagccaggctccttccaatgactgcagcctggccaggccgcctgccttccaggagtcaccaagctgcccatacccctgtttccagggttttcccagcttcaggatgccagtcagcctgtgttagcctttcattactatgacaaaatattccagaaaaacaacataaaagaggaaggttaatcttggctcatggctcatatgtgttcaaaatatggcggtggtagctgggactgcagaggtagagaggagcctctgtttatggggcccaggcactgctgtagaaggtttaatcctcacagcaggtgtaagactctgacaagccttagctactggggaccctctgagtgaaccacaaagagccagggatcaatgcaaaagcaagaagaatttattgttccagagctctggggtcgtcctgcacccaaaggagaggcagtgaccccaggcagcccattcagtccgttgttttgggttttttgtttttgtttttgtttttttggtttttttggtttttttggcttttcgagacagggtttctctgtgaagccctggctgtcctgaaactcactctgtagaccaggatggcctcgaactcagaaatccacctgcctctgcgtcccaagtgctgggattaaaggtgtgcgccgccaccaccaagaatgcttctatttaatgttggggctacaggtgtatgcattacacctatctataatgggtcctggagaccaaacccatgccacgtttatgctaggcaaacactagaccagctgagccagaggcatagcacatttgcgaagatgcttctctctctctctctctctctctctctctctctctctctctctctctctctctctcaggagtatcttgcccctccttgtagatgttttaccagtgagttttccccaactgctgactgcccctcctattagccaggcacatgtgcagggcttccctgccacattccttgttgcctccacaacgtttgggtctatgctcttaccgggaccttcacaggaggatgatcttgaactcagagtagtgatgtgggtgtcattccttgagatacgctctaccttggtctttgaggcaggctttcccactggcttgtcacctgctgatttggctaggctgactggccagtgagccacagggagccacctgtccctacctccccagattacaagcatacaccattcctctgggctgctttgcacacgggctgtggggatccaactctggtcctcatgcttgtaccagaattaccttaccagctgagactctctagcccatcaacactttggaagcaaaggttgaatgagaaagtttttctaggacccttccagggcttgagtgggatccacatgaacacatacaaatacccttctgtggcgagccaatacagcctggttatgctggcttgttgcttacagcacagggctaccactccctgtgccagcacctagcctcttagggctggagaaccttggcttcccaccacgtcctaatgcaagacttagggacagggagccagagccatttccagcggcagtgtggccatagaaggcctttgaaactgagcgagagcccagctttttcttgggcaatgcagaaatcaggcttccagccagcgtatacattcacagccaggcccgttgattgaaccagatcgaagcacctctcacagccccgtcactgtggggcctacgatcgatggctgctttattacacgtcacacattttaatcagaatcaataatccccatgataaacaattaaacaattctttcttcctctgtggagttcctctgttgaaatcaacagggacaggaacacagagtcaggcccgcccatggtacctactcaaggccaaggcctgttttgggtgggcgccctacattgtaacccttccacaaggatccccacaccccccatgctgcactgcctcccacctcccaagagaacccagtagaggcctctcatgtcttagactcaggttaactataaaaaaagagaaattaggttttaaggatgagctaagcccccaaatcagacagtgtgcaaaggaggccagaggctttgaaagaacactgcatgtacgtgtgttcacatgtatgggactgcatgtgtgaggagtgcacatagaagtagaaggccagccttgtgtgttggtttccttccccaggtaccatctactttgtttctaagacagagtaggtcttaagtaagtcttaagacaggtctcagtgggacctgaaattctcccatgaggtgaggttggctagccagtaagccccaggggtctgcctgtctccagctcactagaactagacttaaaagaatgtaccattataccctgatttttgtgtgggttctgagccctgaacttgtatggcaagtactttcctgctgagccaggcctattctctagcctggagacttccttgactttgttcactgcatgcctgtcccacacaggggctcccatcggcagtcatcagggggcagcaaggaatggtctctcatgagtccctgcttttctcctcctctggttgcagagaggccagcgccccccagagagctcctggtaccccaggctgaagtgacagctcgtagcctcaggctccagtgggtccctggcagtgacggggcctctccgatccggtacttcacggtgcaggtgcgagagctgccaggtggagagtggcagacctactcctcatctatcagtcatgaggccacagcctgtgctgttgagaggtacgggtggagtggatggcggagaggtggggtaggggagcagaaggcgggggggggggggnnnnnnnnnnnnnnnnnnnnnnnnnnnnnnnnnnnnnnnnnnnnnnnnnnnnnnnnnnnnnnnnnnnnnnnnnnnnnnnnnnnnnnnnnnnnnnnnnnnnnggtgtggaggggagaatggagggggcaggggaagcagaggaggaggagtgagaggagcatggagtgctggagagcagtaggagctgggtatcgagggccagtaggagctgggtaagtggagggccgaggggcaggagtggaaggggggctatatggggagaggctgagaggcaggaacgcagggtgagggtggggagaagcattcagtattcacctttctgaacctggagtcttagtcatttgtctccctactgtgacaaaaaacaaacaaaactgttgaaagcagcggaagggaggaagggtctgttctggctcccagtttgaggcagaccctcgtgttcctgaaggcatgggtcaggagcttggggcgtctagtcatactgcatcctgcagctcattcgctcattctccatttaaagaccccagcccctggaatggggccaaccatgctcaaagggggtctccgcacatcaagtagcccaatctaggtgaccccctgcgggcagtcccccaggcgtggctccggagtgcttctagagtctgtcaaattggcagtggatgttaacactgggttaccaggcttgatctaatatttaagtagcagtgtccttgtgccctgttcctacatattcactattgatatgtatgaggtgcctctccccatctccttgccccatccctccttcctctttcatgttacagcgttctggtaccctcccctctccaccccaaagcctccttttagcctctcatagacccctttataatatcctgacctctacccatactcgctccctttatgtgtgtaaaggttaggagttttgttttttgtttttttgttttttaaatggttaggagttgtgatctgagcatgacagagaacatgttgaaatgctaacggaaaaataatttttttaatcaacaaaaaaattaatttaaagatattggaagaaaaatgggccccaccctacaaaggggcctactcaaagtctcctactgagagctagccccctgtctctattggcatgtcccgtaccagagactcaaaatcttcagggctcccacattccagatgtgctacacccagacccaaggatttgggaggcaagaggaatggggctgagcctggccacccccaaaaggtagatgctaggaaagaggtggtgagaaggaggtgggtgactagaggtgaaggccaaaaagaccccttctctttgaggtataataactccagccctttgtctggccacgtggaagacaaaagaaaaagctcaatcctgctttccaaagcactctgagagtccacagacactgtgcttggtaaggaggggcccctgtttcaaggcaggcagtttcatttggtccagaggagacctgtcagcttcctaatgggcaagaaccagaatggacgcctgtctcagacagcatcctgagaggctgtttttgtctgctgtcatggtgtcacccctaataatcccaacagctaagtttacttccatctgccacatgagatcggctagtggagagacaagagcttaactgtggagagctggtggctttctgctcaagtgactgtagtccggagcatagcatgagggtggggtgtgagctgctggcatcgtgatatatgcagaacttcttatattcccaagaccatgaatttagccctgggtagggacactgaactgtaggctgtgccttactgtcttagggtttccattgccgtgactagacaccatgatcaatgtaaagcaacagaccaagtgtcatttcattggggctggcttacagtttcagagattgagtccactgtcctcatgggagggaacgtggcagcatacagaccatcatggtgctggagttagctgaaattctacagcttggtccgaaggcaacagaagaagattgtcactgggtgtggcttgagtatatatgacgtcaaagctctgcctccacagtgacacacttcctccaacaaggccacaccttctaatagtgtcactctccacgggccaagcattcaaacacatgagtctgtgaggatcatacctattcaaaccaccacacttacccacatcacgctttctgaagggctttgccagtgcgggtaaaactctcgtgtgaacatccacagtactagctcatgctggatgatgtgaccacggctcccatggtattacagagcagtgtgtgtaataaagtttagtccctgtgctgggaaggctcctcatttcctgaatcttggatactgaggaaacagatgttaatctcaaaactgtgccttaatgtagcttatagaacatctgggtttgaaagacaaggcatacagattgtgcaaagggccaggggacacttcccataatgtggatgaatttcatgtcacccacagagacaaggagagagaactttccagaaggcaaagagtgccatttattaattgtccactatgtgccaagaccattagactgttgatggcaattcaatgttcacaaatggtctcaggggctctgatctccatttttacagatgaaccaagtgaaacccataaaaatcaaatgacaagtggctcaccccagctggtaatgatggagctacatttaaattctgcttggccaaccccataggagaggctcaggttaccctggaggagtgacaaggatgtggggagattcaaagagcaggtctttctttcctttatcagggagtccttgagactggccttgatgtaggattgaccctggcaggatggagacctgggttgggacagaggtgagatctgcaggagtgggtggggccagatgcatttgcatataggatgctagttccagggaactatagctagcttagagccagggacaggtcatgatcaccagtcatcatcataacaggtctcctctgagtcacaagactccctgcagggcctcgaagttcctcttctgtttgcagagtgcagacctggcttccaacctgcaaggttagctccctgaacctcttgcctgtctgcttccagcatccttggtgaatggagtcccggtgacacctggtctgctgtaggcctctgtgtctcgtccaccttcactgtcagcttcatttgtcacaaagccggtctggtccacccagccacacatcactgcacactgctcactgtgttgaacaggacacccaacataggtagggcaatggagaaagcatccttgaggaatgttccacatagccccttacaggacactgactcctcactctgtgagctgatgaatgtgatctcagctttctctgttttatgtgcaggacatgtcctgctttttctgtttctaattttactttaaattttttcttcattcctgagaattttgtgcatatatacaatgaaagatgatcatgtttattcctccaactccacaatatcccatacaacatatccctccaatacacacacacacacacacacacacacacttcattacgtatagttgatgctattcatatgtgcatggatgtgggaccatccactggaacatggcaatcccaccagaggtcacattatcaaaaaagagtgattcacaatcctctccagggaaattagcatcctctatggtctctgagacatctgtaatgtgtgtagtgcacatatatacactcaggcccatacacatatacataataaaaaacaaccctttgggctggagagatggctcagtgattaacagcacttacttctcttgcagaagacctaggttcagttcccagcacccatgtcaggtgactctcaactgcctataactctagttcttagggatctgaccccttcttctggtctccatggcacctgcatgcacatagatgcacacatgtacattaaataagtagataaattactgttcttcctcctgcccccagcaactgcttaaagcttcctggtgtggggtggctgagcctggcgattatcgaccccatccgagctggcatttttggctagcttgatcttgtatggacaaccccagctgctgtgagttcctgtgtgacagccatgtcacctccaaggggcaacatttcacagtgctcttgtgttcctcctgcctcctcattcaccgtgttctctgaggccatgagggaggctatggatgtatggtttagggttaaacactcagccttttatttgtagtgcttgacaagttatccccacgttgactattgccctctgtaaaaagaagttcctctgaccaaggctggagacacccaggcctatgggagcaaacacagctatttaggagacactttgaccatttaggaaaatacaatcataggttctacctacaacctatgacctcctcagctatggacttgtgaacaggattataagatgaggtaaaaaaaactccctcttggggaacaggcctcaaatccaatcagaaagtggttagtcacctccctaacagctgtgccactattgtctcaggagcacatcttatctggaaggtcagtattacagcatgtggcatgtaccctcttcctctaccttctcaagaggatttggagcagcactgtcaccataacgtgttcatttctttggcaaagtgttattgaacatccctaggtgccgagcagagttctcagtgctaaaggggcaggagttcctgaggctgctctagcctctatctttagggatgtagaatgatagtgtggccatgatagagaagacatgagagggccaggggtgtggctccgttgatagagtgcttgcctggtatacacaaagctctggatgccattcccagcactccatagaaccagatgtgatgacacatgcttccaatgccaagtcttgaggatatggagacaggaggataaggaattcaaagtcatcttcaggtacataggaagtccatagccagtcttagctacagattcaaaacaaaaaggaaagaagnnnnnnnnnnnnnnnnnnnnnnnnnnnnnnnnnnnnnnnnnnnnnnnnnnnnnnnnnnnnnnnnnnnnnnnnnnnnnnnnnnnnnnnnnnnnnnnnnnnnnnnnnnnnnnnnnnnnnnnnnnnnnnnnnnnnnnnnnnnnnnnnnnnnnnnnnnnnnnnnnnnnnnnnnnnnnnnnnnnnnnnnnnnnnnnnnnnnnnnnnnnnnnnnnnnnnnnnnnnnnnnnnnnnnnnnnnnnnnnnnnnnnnnnnnnnnnnnnnnnnnnnnnnnnaaggaaagaaggaaagaaggaaagaaggaaagaaggaaagaaggaaagaaggaaagaaacaaggccaaaggccatccaggactgttatgtgatgggcactttagctttttaagataatatctaagaaataataataacagttcagttgtgtgtgcatacatgtgtgtggtgtctatgcatatgtgcacatgtatatgaagatagtcgcgcataggttagaagaggatggcatgtgtttttgctctatcactatcttattccattgagacaaggtctcttactgaacctggagctagtttggcaggtagtaagcctgcctctccttccctcacagtgctcactggggtcacacccacagccacacccacccatgtggtattagggatttgaacttgggttctcttcatgcttgcacagcaagcccttttacccactgagtcatcttcccagctgttttaaatgagtgcatactacagagtctcccaagtgcctcatctcatttaattctcgggacagcctcttgatgtctgtctgttagctacccagatgtcttagttaggaggcacagcatgaccaaggcaactcttcccccacccccaccccccacagggtttctctatgtagccctggctgtcctggaattcactctgtagatcagactggcctcaaactcagaaatccacctgcctctgcctcccaagtgctgggattaaaggtgtgcgccaccactgcctggcaccaaggcaactcttattaaaggaaagcatgtaatttgggctggtttacagtttcagaggttcagtcccctgtcattgtgccaggaagcatggcagcctgcaggcagacatggtgctggagaagaagctgagagttctacatctgaatcaggcaacagcaaggagagattgtgagccactgactagcctggcttgagcatctgagacctcaaagcctgctcccggtgacacacttccttcccaaagccacacctattcccacaaggacacacctcctaatagttccattccctgtgggccaagcattcaaacacatgaatctatggcaggccagactattcaaaccagcacaccagatgaggaagtatctgcagagtggcccatccaagcatggctgggtgagagactagaaggtatgtcagagctcacatttttaagagccccattctgccttcaacaccagtgaagcagctagccattcaaatgcagggtctcagtgtatgaggttgtgaagttaacaggggacaggcaggcatttatcactcaaattagacacagtagcttctggaaatccgggaacaggtggacatggtttgtttgagctaaacaaaagctgtccccagaaaccacagcaaagatcattctaggcggcagacctttgggggcctctctgttaagctgagtttaagccaaccaagaccagagtctcctggttgctgctggtgaagccaggcctataggagtttaggaattggcaagaccagaatattccaggggctctgagtagagcatcctttgtagctttagagaaatgctgttatctaatgcattcagaggcaagggaccacaaaagtactctgattgtggcagctacaaaaacacagctctcacctcaagggataggatttattctgaagtcaaatatgagtaaacatagtccaggactaccagactacctcaaataccatgttccaacatagtaacaagtccatgaagtttttatggtaacacaaagaaagccttaactcaaggctatttaaaatacattgttggaaaccgcaggcaggtggttacagagagtggaggaaatctctgctttcgcttcagctgctgtctgaggacattcttagcctttaggtgggtgtggaagccagaggcccgtctgtaccttctgaaaggatttggctaaaagtcacatggatgttcagtcaaacccagaagtagacattgatggctgtttagtggactaatgggtgtccaagatagcttcctccgaatgtgtgacatcctagaagttctgatcagtcaagcagccttgtagaatgatcttttcttttctctttcctctcctctcctctcctctcctctcctctcctctccttccctttcctttttctttctcccaccctggaactttaatccacaatggtttctggaattgattaaaggttttctaaagaacagaacctgtctttgaagccagcatttccttattgccccattcccttcctgcctgatgaccctgccttggtgtagcatgggcttagcacctggaagggagaaggactctatggcatgtctggtttgggtagggcagagacatcaggaatccaaggaggttgatgggccaggacagagccctgacaggcaccttagggaggagcgaccagggaggaattaggggcaggctttgctttggatacattagagctagaagacagatctctcagctcttcccctgagcccaacgccagctctacccctccatccttggcctaggcaagcaatcatttactgagtagcatcttattaaagaggtactgaatgtcctctagacaaaattgtctcactgatatctccctcagtggtactgtctctcccagggcaccatggcagtctagtgggccctgaaagaatctagtagctgtatccactgagtggttctgtccatcctggttgcagggtgactcaactgagcagttcccagggcagaagaaacatctgtcagcctctctaaggttccttagttgttacacagacagacagacagacagacaggctccctatagttactgatttctttccattgcaggctgaggcctttcacctcctacaagctgcgcctgaaggccaccaatgacattggggacagtgacttcagtgcagaaacagaggctgtgaccactttgcaagatggtgagcaaaagccagcccaacacaaccactccccactgctatgccaaggcccgagggcaactttctcccagaaagagaccctgttccagtcctgagcagagaggaggggtcaccagggagggtgacaagcagaggaagtccattagtaactgacagcctggggtgttcctacacaccccatggtcataaatcaagcgccccccccccccccgagagcttccagatggaatggaacttgctttgattggcttccaaaaccattagaaattgaataattaatggaggtcgttaaaaataaatgtctgcgggtagctgggtccaagcagtttcagattcccccaaagcaccaggtggctttttcacccccttctgacctcataagcactgggcctgaagacacattgtcagcgacctgttcctggatatgggaaggagtgcggtgatcctgggagagcactccatcagacacagcgataacctgacaagcctgatgggagatggatactgcataactcccagatcagcctcaaagcccaggcacttagtgcagccaccagggctttgtggtaactcccagaaagctctgtcttttccatttaacgctccagtgcaatggtttccaaatgggccaggtcccagctgcctggtcctgtgacctcacaccatgtgtccttgctcctcctccccacttccagacccttcagagcctggaagtttaacttgttctacacaaagtttcaggccacctcagggactagcccaaggatggagataacccattgcagcttcccagctgcactcaagatgtttgatgcaaaaacaaaataaaaacaaacaaacaaaaaaccagagagctctcacctccacaggaatgggagatactttacgtgggagtcaaatctgagtgactgtggtccagggaaacacggattcaggttgccttaaattctgtattccaacatgataacaattccatacagtttttatagtagctgaacaaaggaaattttaaacaagaacaattttgcatcaatgtgtggaacaaattggtgggaacaccaggtaggtaagatatggtaatgttgactctacatctcagacttatctggtgacatttttagcctttgagttagggaagctggggtctgtttatacattccaaaaggatttacataacagtcacaatggtgttagattgcccacagtggtagggaatccatggttatttagggactaagatagccaaagataattcagctccctgacctgtaacattccaactttctagggtcacagaagttgcaatggttaatgtagatagccttttttttcccctgagaacttcagctaacagagagaatttgctgcaaacccagcatccatactgttgtgtccactgggtctggtcctgatgaaaaggactctaggcttccctgaatccctggaaaaatgaatcctgtgctctcatcctgagagttgagatcctgcttgcagctgtaggggccaagaagcagcagagctcaggagagaagcggtgaccttgtacaggaagctgggtgggcggcccaaggcgcctggcagggcaggtgggaaacagcagacacaaacccccttcactcattgctaagaatatgtggagggagaaaggctatcaatgaactcctttaaacctgagggtgtgctgactggagagaaagtccagcgagcagcgtacttgttgctcaagcataaggacctgggttcaaatctccagcacccatgttaccaaaaaaaaaaatctcaacaacatttgtaaccccagcaggtgaatgggggtggaggtgccagggcttagctagccagtttagccaacgtggagaaactgtgggttcagcaatagactttcaaactaaggtagagagcagcgaagagatatccagctttaacttccagcctacgcacactcccctgaggaccagcatggggcataaacatgtacacatatgcatagagtctacacacaagagaggggagggggtggaacaagggtagaaagtcggcatcaaaggaaacctgaaaaaaaaaaaaaccacattcatttttatcttgcatcagacacaatggagagaatatttgcaacagtgcactaattcttagaagaaaggaacccagacacctagcaggctgctttcattgttgggttatctctgacaaacagggagcacgggatcctgacagactcccagcgacctcaaggaataggccatttctgaaaagctattcaaggacctctccagactccccaggccccttcttaagcctttgatattcaaatggagcttttgaggctcctatctcatcatcttccttgtctgagacttgcaatttccctttgtgggtggatttgcattgtgtttgtggccctttgtctctctctgtcaggtggagattgactggcaagaccaaccctaccacagctagaagagggaggggcttctgatgactctgagtgacattttctttttcttatgttagggatgggatccaaagccttgcaggtgttcaccccagcccctcactgggggattctaggcaggggtctaccactgagccacaccccagcccctcactgggggattctaggcaggggctctaccactgagccacaccccagcccctcactggggcattctgggtacttactctgtaactaagccattcccttagacattgttggttttgggttttttatctttgttttgttttgtgctgtttgacagagattcagttatggcacaagctggtcttgagtttgcagtccctctgcttgtgcttccaaagtccccaggaccccaagcatagtggtccctgatcaccatttttttgttggccgttttgtttgtttgtttgtttgtttttcgaggcaggtttttcaaggactatttaacagtcttggctaccctggaattcattttatagactaggccggccttgaactcacagcgatccacgtgtctctgcttcttgaatgttagaattaaaagtgtgcaccaccactgcacagtccacatttctaattaacctgatatctatccactgcacaggattcttgggacggataaaggtccacattgatgatagtataaggtctagagcaatggttctcaaccttcctaatactacaaccctttgatacaattccttatgttgtggtgaaccccccccccccaaccataaaattattttcattgctacttcataactgtaattttaggcaacccctgtgaaaagagtcattcaactcccaaagaggtcaccacccataggttgagaaccaccggcctagagggtgacactagggtccacatgtatggccaagtgtggatggcctggaggactcagaggagaatcagcctgggacaaacctgggatgtgaggtagacagagcccggtacacatgtgaggtcaaggactatgcccaatcctgtctagctccataagcacttgttggactggctcttcttggcactcgggcacagctgaggagatatagaggatcagtttggtagataagcgaggactatgtgatctggagagggcaaaagggccatggggaggaggcctcctacacctgatacatgatagggttctgctttggtccaaaagcaggctcagccatggcaggaaccaacccaaccttgtccttcctgagaccagaccaaaccactacagcgtcctggctcacagccagatgccgtttgccttgctaactggccagcagcagcctcgactctaccaacagtcacatctgtgtttcatactaagaacacgtgacctcactgtgaccacctggcttgctcacaaggaatgaacaactatcacccatgatttcagaaaatgctgtctgactgctattcctaaagacatggaacccaaagaaggtttttgggcaggagctcccagaggattgtgggtgtccgcaggggcccatgggggattccagctcacctgaatgtcccagcatggttaaaggagccatccttgttacattaggcagatgaatgacggttgaaggtacctgaagagaggaaggccacccccacaccaaagggcatctgaaaccctccagagccattctaaccctgctttcttccatctgctgccctgcagttccaggagagccaccagggtctgtctcagccacaccgcacaccacgtcctccgttctgatccagtggcaggtaagagccaggggcactcatttatttctgatgtatgctttggcttcctggttcagtcagccatgacaactgcagagtctacacacaagctacgcacacgtccagtatataacagcctgtctgtgttagacagaacccccaacggaggaatgacagcaggagtctacaggagaggactggcccagggttggggctccccaaggcccagcactgaagaaataggtgttcagatctccagggctgcagcctgccctcagaccaatgggcttgcagagcacagggatgagaggagaggcagagatgctggctagtgaggggtgacattccagatgtcagacctggggctgtcctgctaaagagtgtgaggccctaagggcctgagggagagctgatactgtgggccgtgtgcagagagccacaggaaggcttgcttagcccaggtttgaccactgtgtgctggggataaagagggtggaccaagtagctatgagactcgtccttaagattggtggtggtaagccgggcgtggtggcgctcgcctttaatcccagcactcgggaggcagaggcaggcggatttctgagttcgaggccagcctggtctacaaagtgagttccaggacagccagggctatacagagaaaccctgtctcgaacaaaactaaaacaaaacaaaacaacaacaacaaaaagattggtggtggtgtcaaagggaatggcaggtgctaacatgaatacagagacaaagacacctcaatgactctgttctggacagactttcaatactatgacaaaataacctggggcggggacaacacaaaagagggaagacttattgaagtatttcagtggattacaggtcatcctagaaacccattctaaaagaattatttatatgacccaatgaagagggagcctgctaggtggcagagacttatctctgagggctgaaaggcccaggctagggtactagtaagggcctgggaaatgaatgaccctctgggcaggatggcctaagaattgtgtggccatacctcaaacatgatagacaattcagagcagagccctaggatactagagcctggagcttgcactaagaaaaagagaaacaggagcaggcagctggaggaaccatcttacccccaaagtgtctggaccaaccagctagtataatggccagtggctcctacgggtctagatcatgaggtataccatgttgtctcttggtacctaagtgttaggttgtatctcacattagctactttcctcctagcaaagacaaactatctaataagaagcaagttaaatcccggcactagggaggcagaggcaggcagatttctgagttcgaggccagcctggtctacaatttgagttccaggacagccagggctatacagagaaaccctgtcccaaaaaaccaaaaagaaagaaagaaagaaagaaagaaagaaagaaagaaagaaagaaagaaagaaagaaagaaagaaagaaagaaagaaagaaagaaagaaagaaaagaagttaagcaaggggggagggtgtattcaggtttgctcggcagcaagagctggaggcagctggtcacattgtatccttagtcaggaaacagagagatggatgtcatggccagcttactttctccttgttcaatccaggacccctgcacataaattaccattagagacctgctttgtataacctaatctagaaacttctttactgacatgcccagagctctgactcctaagtgatcctagatcctgtcaggttgacagccagtactaaccctcagaggttatgacactgccattgaggcacgaaagtggagtcaacctaatggaatatgatgctgtcaacttcaggaggagcagagaacaggactctagcagcaaaggtccctactgggaatataacagctcccctcattgacaaagtcactactcagtgacaggtgtctttcaaggcaataaaacgatatttccaaatgtttcctggtgacacttggcagctcacccctgtgtccccagcctctgggttcaccagagtatgggggacaggacagaagaagagagaatcagccagggcttccatctaccccaatatatctaggagccacctatgccaaatagcaaatggccatgacctcagtatgccaggggctactgtgatcctactgaggcctctttggacagcaggtgtcatggatactcatctctgacatttccagtccttactccctacagaccctgcttcagccctgacttggcatcaggggctgtgacgggaagccagaaacattccaagcagaagttcaaagtcctgggtgctgctgtggctctcgccttccgtaaacacgccagagggaggggagaaaagactggttttgtttttgttttcagttgctgctgggatgggaacacagcgccacactgacacctgcagcagtccaaggaggtcccttaatcttttagggatcttgactcaaataaaaccagccccttggcatcagtgtagccagtgtgaagcagagtgagcaatccattaaaacgagaaagaaaggcaccaggcaaagagcatggcacacctcagagtgagcacggcttcccagagactgtccaggttcattcttcactgtgtcttctacactggaagttcctggaattctgctgcttagagaattcctaagaggccttcccctcccccaccttagtccccctctttgataattgagatcataagaggactccagagatgccttgggtcagactgtaatcaaatagagtgattgggagccctaaggctttggttgaggtatttttcttgtttgttgttgttttgttggggggggggtaattttggttttgtttgtttgtttactgtcagtggggtttctagtgagattcctagaatactgaaggttacagctgagaggagatgccttaggcaaattaggagatttgccttaggcaaataaatgttccttggatctgaattgattctcagcttgtgaaaggcttcaaccagactctggggtgaagagctccattttcttctcctgtccataattctctctgcctttctgactgcctccactcctactgtgccagagtctactagaaaattagcattttatttgtagatgtggcagctggtataccaataatgagatatgcatcttttccatagaggcagggagtgctccgggcagggtgcatcttcccctttgaatgaagttgctgtggctataagctgctgccagtcccagtccacagcagcacaggtgtcaagcctcctccatggctgctgagcagcccccgtgaagtggctcagagctgcaccaaaggcacttggcatatgtgcccatcagctgtgccctccagtgtccaatagaacaaacagatttcaaaaagcccagagcaagaggtggtcagtccaatgtacaatagaaataaatgcctgtcaaccagcaggcaattgaaacacaattaaaattatgagtaatttaggaaattggaggctggaatgaagaaagaggaactgggtttaaatatagattctcgttccccatgaagcatctcacctgtaaccttttgtttttttaatatttgctttttaaaaaaatacaaacatgggctgtaatttgaaggctgtggggccctcgtcaataccttccccactgtgagctgttgggcttcaggcttcttagggagcagatcaaactttgcctttagcggggtccaactctgctagaatcctaggatgtgactatgtgtcccaggtgggagtggtgtcatcttgtttgtcccagggcaggaagcctctaaactgatgacgacactgactgtccccatgagcctttctgtgcaccagtcccacacacccaccctcatgctaccctggtacctcaagggggtgtttggttatttttctccttgctgtgactaaacacctgacaagaagctaacataatggagggaaggcttgttctgactcacagctccagggtgcagtgctccatggtgggaatggcatgacagcaggatcttggacatctgcttacattgcatgtactgtgaggaaacagaaatgaatgctggtgctcttctttagagtgaggatagcagcctatgggatggttaaacccacatttagggtgagtcttcccacctcagcacactctagaaacttcctcacagacatgtctggatgcttactgacaaaggagagacctgatcacctcttgcataggctaagggactctttcttctgtgatcaagatggcagccaagacaaaggccatggggcctcaggcatgtacagctgaaaccccagggtttattttcttttctcgcctcctgtacttcagtacatagaagcatgagaaagcaaggaagggggccttctagctgtgcccaagggacaaagaacacatgacagagtgactagatcttttccaggggacaagatagagaaaaggcccagcctgggcaaagactcaactgtaaagtttctggctctcatgatgtagatatgttatgctccccccaaagtctaatgggttgcatgcttggttctggacacaagtagccagccagctttggggctccagggagatggtcggataagtgatctgactaatctgttgatagacccagaactcaaagagactgttggggtacggtggagctcttgaaataaggagtctgaatattagaagtagttaactgggagcatgccgtgtgtgtgtgtgtgtgtgtgtgtgtgtgtgtgannnnnnnnnnnnnnnnnnnnnnnnnnnnnnnnnnnnnnnnnnnnnnnnnnnnnnnnnnnnnnnnnnnnnnacacacatgcatttacatgctcaaaagtgtctatttgtgtatgcctgtgcatgcatgctgggagtcgagaggtggacattgggtgctttttttttctattgttcttcatgtcttcagggtattcatttatttagagacagagtccctcgctgaacttggagcttgcagctatagcaactagccagggagccccagtgattctcctgtctattctccctgctgaagtgctggggttacaggtgcctatggtcacaccttgattttacatcagtgccaaggatctgaacttggattctcatacttgtataccaatcatgatgctatggagcatccccttacctggagtgggcatttgaaggctgtcctgcctctttctatagatctccctcagcttcctgtccactgtgaggtgaccatgtgctccccctgccacattctgctgcccgcaccgaatcaatggggccaagtgaccaatgggcttaaacaaccccttcctccttccacaggtgttcatcacagagagagtatgatgaacacattatgtgctcaatgctgtgtttgaaatgaaggcaacctgggcccgcccctgtgtaaccaaccctaaaacactggggtttagcctcaaaggggacccctgcattattttctaagatatggaggtcacaggattgtgagcctagactcctggtgacctcggaagtcccctctggattcagatttgttttctcatgctctcacaagaccctgaatcctaggtccctgttgtaccatagggagagcctagctttgtagcctaacacccacctaaacaaagagtaaacactgatggaggccagcagctatgggacccagcccagccctgtcaggcagctggaaggaaaaatgctttcttagttacttttctcactgctataagatgcctggccaaagtgacttaagggatcatttcatggtggggaagcctgggcagcaggagcctgaagtagcctgtactatttcttctgcagtcatgaggcagaagataatgaatacctctgctcagccctctttctccacctatgcaatccacgctcctagccaggggatgtcaccacccacagtgggcaggtcttctcacctcaattaacctaatcaagatagcccccacagacgtgcccagaagtccatctcccaggtggttccagaacccatccagttgccagttgagattaactaccacagaggctgctcctctcaacacaagtccctccctccactcagttctgccaaccccttctgcctctttcccagggcaccattctcctgtgtagtgtgtgatgactccatccatttggacggggactttggaaaagccatcctagactctgagtctgctttggttaggggttgggcagaggagggaagcattagaaagagtttccatgtctctctgagtttctgcccatgcagatggccagtctagaaggaaggacatgttaatggggtctccctgctctctagcatgttcagctcaactcgacaattgttggctgagcacccacagtactcatggcgtgtctcaggtgctgtagagatgtggaactgagcacaaggtggcagagcctttcacactggaacaggtgctggactaagaatttcaggctaagggcttggaaagaccgagtctaattccgaacttcttccagagacgctgcaaggcatggcctcaaagttgaagcagatgaggaggtcacggtaccaggatttaaatccccacctgaattgcccatccttttggacccataagttctggggaactaccattcaggcacttagaaagacttctaaagctgcccatctgactttcaccatgatgtcaaaccacaagactaaagagcaaactaaacccaatgcagtgctccacacaagctgtccctgagtctgcagcctcaccaggccctgactgagtgatgtccctgcctcacaggacctgcccatgggcagatctggattggctgcagcctccagggaatctgctgtctatgtttatgtcagtcagcatcctgaactgtaacaaaacatgtgagagagttaaggtagaaagaaaagaggttgttcattccattcacagttcagcaggtgccaatccaaagtcaaggacttgttgattagagcctctgttgagaaatgcatactagaacagaatgttcccctcatggctaggaagtaaaaaggaagaggaagatagcgggtcccacggtccccttcaagggcacaacatcttactaggccttgcttcctaaaggttccagcttagagaatgtcctagttagcattatcagcctgaagccactgagacgagtctaaattgattgtctttatcacaccagtctgtgagcatgtctatgaggactccttgattgttaattgacgtaagagtgttcagcctgcttaggcagcttcgtttcctgggcaggtgatcttgggctgtgtaagaaaactgagcgtgagccagaaagcaaggcagtaggcagcatttctgttcctgctcaaagtccctcctaaagttcctgcccgacttccccagctgatgaactatgacccggaagtataaactaaaagcattctttctccccttgagttgcttgtgatcagagtcttatgtcacagcaatgggaaggaaactgggggtgggtagagcacacaccctgggggctactgatccagaccacagcagatacttgctgggaagacgtacaacttgactctgggggcttctgatgtcacctggcaaatgtgaccctacctagtgctgatcatcattgtcccttgagtggaggggcttgactcctctccccctgcatccttggacgtgactagaaacatctcagccttccatgcttcctttcccaaacctcagattgtatactcaaaggctggggggggggggctgtcaacagctgcacattcacattttgtccccagcaagggcattttccttttcccagcatcctgttcagttgatcatttgagtgaataaaatccagtcctgcccactcccccactgtccatccccagcccgtgcatcttctgcagtgttggtcgggctttagcagtcttcccactggtgtgatcccagactgacgggcaggctttgaaggtgacccttgaggagagactgctgggctggcacttacagagcccagcagcaagctttagatgtgcccactcaccctcccttcttgccgatttgagtcagcccagatcccagaaaccggagcacatgccatctcgtctgcctcgacagagtcctgccatctgcacctcccctcagcgtgagtgaagacagtgccagaaccttctgcatggccacgtggtgttatctgagctgcaagagcaggctcctgccctagcagtcagagacactgtacagggacatgaatctccctgcttctttgtcagggacctaggaaaggagggctagacaagttctggcctgggacctggagtctgcatttttcagccaggctgcccactctaggcagaggatcactgtctataccatgggctgtgtcatgaaggactcttccctccttcagaggcagcttacaagccagttctgtctatctcccacgtgccccaggcactaaggcgtcctcagaaactgcacactaactgctcacccacctccatggctctttgttatcccttcatcagaaagtctcatagccccaagaagatggaggtggctaggctcaaggtgcagagctcagagaccctccatctctttatggctctaccctgtgcccacacaagcttgctgagggcaaagggatgcaggaatgtaagatgccactgctcgtcccatcctcaaccatgccatctcccctcaggaggggtccaatagcagagccagcttcatcctttggggaccatatatctgtgaggcaacttgcaggcatgggagacagaggtgcccaacctttgtggctgcttagttggtagagcagctgagggcagagccttcttattcttgcttcagtacatcgacagctccttcgtcctttcatgtagatgttagagacatacagagaactgcctcttgctctcagaaagcactgccttccagccttaacaaaatgttagaagatggggcaatggcccatccagcactttccttacaagtatggggacctggagaggcagaaacagacagacccctgggcctaccctactgggcgagctccaaagccagtgagaaagcctgcctcaaaaacaacaggataggctgggcgtggtggcgcacacctttaatcccagcacttgggaggcaggggcaggtagatttctgagttcaaggccagcctggtctacaaagtgagttataagcatgtacacacacacacacacacacacacacacacatacacacacacacacacacgcacacacacacacacggggggggggggtgtgccgtgactgggagctgctgagtagtctgcacagcatgcctgggatccctgtagctagtatgttgacagattctatttccaacagcaacttcagtgctccatacacacgctatgctcccaacccatgtgtgtttgtggttgtcagccatgtcactgacatgtgttcctggcttcccagacctctcaacttgtgcatttgatcaagcagcaagtgctagttgtctggagcctatgaaagcaactgtagatcctctagtctttgagtctatgtcataaaaacttgacagcagggtgtcctggaatggctgtcacacatacttcatagccatcaattggttctggaggccagaagtccaaggccacgtaacaactgctccctccagagaagacaaactcctagcaccacccagcatcttgaggttgaccatggccattagcttataaacataccacttgactctccctctccatatccatgtgggattctatgtgtccacaagtccaaatggcccccctcctatgaagacaccagctattggactaaggacctcccaaatccaatctgatttcctgtaactaattatatctggggggaaaaaaaaaaaaaagaggatgaactgggttcctgaaggggaggctggagctatatgggaggaaacagcaggagaaataacgagaccaagacaaaattctgatcaaggcccaagagtttactacgagtctgagcttataaagggggaaggcccatcccctgtcatgacaggctcttgatgctttgttgccaggctgtcagcacttggtcaccaggctgttagcacttggtcaccaggctgttgcttatctcgggaagacaggttcagcctctcagcaggtactggtggcagaacaatagacctatctaggtaggtagactccaccctaggtggtctagttcacagtggcagaacaggtctaagccagcctgctcaaggctgagggaggctacaaagaggcccaaataagggtgctgtttgaggaggcttctccagtccccttactgtttctaggttcacctgacagagagaagctccctccttctctgtgcccacacctggctctcctgcctcacctcaaggagttgaggtggacatagaataagaactcatgtcttcttgtatcagctagggttctctaaaagaacagaacataaaatgaatattattagcgtggccgggccctgggtagtcccacaatggctgtctctccagtcgttgttcagtccacaaggctggatgtctcagcagctctaatctgttggctggagtccgagtggattcctagagaactgctggtcttcagtctatgctagagtcctgaagaagtagcttctaataccagtgaaggaatgcctcagcagcagagtaaatgaccttgccaacaagagtgaggacaaacaggcaaaagcaaacacttacttccctctcacatgtcctttcatgtggggaggccaccagaagctatggccaagacttaggatgggtcttcccccgtgaatggatgcaatcaataaaatccctcatagatgcgcccaagtgcttggattttagttgactccagatgtaatcaagttggcagttaatattagcagccatcataccacacacaaggtctgagcatggctccacagctgactctgagcctggaatggtcaatattttccttctaataatcttacatctttcctccatgtgtgagtgtgaatgtgagtgtgagtgtgttgtgtgtacacacacatgcaggtgtacatattcatacaaacatggaagccagtggactacctcaggtagacgttgacaataatttttgagaccaggtctctcactggtctgtaactcaccaagtagtctaaacaaaccccgggaatcctccagtctcccttctcccagtgcaggattacatgggttcagggaattgaactcgagtcttggtgcttgcaaggtgagcactttgccaatctcaccagctctcctcctttgttttttacaatcaaggactataggcttgggtcctgcatattggctcagcagataaagctgcttgcagccaagcctgataacctgtgttcaaacgctagaacccacatggtagaaggaaaaaaaatcaactgaaaattatcctttgacgtccacattcatgccatggcccatatgtgggcatacatgcatgcataaatgcatgtgtgcccacatatactcacaaataataatcatcataataaaataaatggaaacatgatttgaaaaaagaaccatgggattgaaatagtgactcttcaaggtgggctacttacaccagcatagaggttaccaatgtacacatactgactctggaaacatccccaaacgactgagtgtacaatgtctttgcagcctccccgggatgagagcctgaacggtcttctgcaaggctacaggatctactaccgtgagctggagtctgagacaggcatgagccctgagcccaagacactcaagagcccctctgccttacgtgctgaactcaccggtgagcagtgctcctctgtcctgggggatgatcacaggagaacctcgcatgtctgtctgctccatggaaggcatgccaggagatgctataaaggagccaggggaaggcacagtgagggagcaggcacagtgtaaggtgaagtcagtagggcacgggtggaagcagtagacttggaagctggactgaaggaaggggaacacactgtgtggaaactggcctgaggtgaaggctacaaccatctaatccatccctgggctcctgatctctgctgggcctgactccactacagccattcttggctctgttaaaagtcaactaccaaggaggcagcttaagaccctgccttcccacccccatctctggaaggagactgtccattaattgtatcatagaaaattctctttggccaggtgtggtggtacgtgcctctaatccaagcacttgggaggcagaggcaggtggatctctgtgatgaggaacagcccgggtcagggaaaacttgggcagcccttcctacctaggtcatctccatcaggccaggaagatgtctgatgttggctcacctaacatgcaacagacccccctgctccaccccattttttccaccagaggcccacatgccaactgcacacaaacctgtccctggtgggctctcaaaacatgtaatgagtgactgtctcacacccttcagactagagtcccacaggttgcaaacatcagtcaatggatagtcctgcatcccagaaaggcctgaaggaaacctcccctcccccactgttaccaatgcctttatcattgtttccctctgtcagagggccagctccccaccacctgcctcaggctgatgcatcttgatgtgttaggaagaagtatggtaactgccagcagctagggagaagctctcagtctctatagcccccagagaactgtgggagtctccaccgcatcccatctaccttgcagtgtgcctcatggcttgcagggatggggtccccacacatggcttgcagggatggcgtccctttgcactaactaccttcttcaccccttgtagctcaaagcagcttcaagaccgtgaacagcagctcctcgttaaccacctatgaattaacacgtaagtgcacagccccgcgggccccaggactgcacacagtgatgcatttctgcccatccatctctcagaggtccaagtagaaccagcctggattcggggctctaattgctctcacagacaagcacacaccaccctgcatgctcttttcatgggttcagggaattgaactggagtcttagtgcttacaagatgagcactttgccaacttacatatctcaccagctctccccctttcagtggccacatgcccacacagaggggaaatatttagaggcagaggatagtggggttcataatattgctgtctagcacttcatctgactgagatggaagagaaagtcagacagggcaaaatgtctcccatgacgctttctctctctctctccctcccttctctctctctccctctctctctctctctctctctctctatctatctatctatctatctatctatctcatagtgatagtgaaatatataggccacaatttacagtcttaaccatattttttcaggttatgagtatttcacctacatgtatgttcatgtaccatgtgtatgcctggtgcccaaggaggccagaagagggcactgggtctcctggaatgagagttacagatagttgtgaacatccatatggatgtcaagaatcaaatgcagatcctctggaagaacagcaatcgctcctacctgctgagccagcccccatcttaactagtttaaaggcagtggtccacttgctttctctctgacctgaaaccctctcctttgaatactgatcccccaagagctggggttgcagttcggctggtagaagaatgcttgcctagcatggagaagcctagggttccattcccagcacggcacaaacaggtgtggtagtgtgagcctgtaatctcagcacttggcagttggaagcaggcagtcagaagtttgtaagtgcctaggtatttatctgctggctctttctgggagagttgaggggacaaagtcaagctggctcatggatactttgttgcccttcacctgggcacaggtgggaagactcatctcatttgattaatagtcatgtcaggagacatgatggaggcatttcctagtcttccagagagcaatcaatctacttctcttctgaggtccccattgcctggttgtggccacaggggaatctaagaacagaagctggtccatctataggctgaccctgtgtgtttgaccttgtagatctgaagaagtaccggcgctatgaagtcatcatgactgcttataacatcattggtgagagcccagccagtgtaccagtggaagtcttcgttggtgaggctggtaagctccaagcctctcccttatcttccagcctgacaagggctataagaatcaaccagatagcttcaagaagcatagacacttatgtcacagtaagagcactcaagaggaatgatttattttggtacccagtttctatacattaagtggggaggggtggagcaacttccatcatggaggaagtgaaagtacttgcctacatcacaaacatcctcattcctccctggtgttctttcaggtagtaggatgttctgtcagtctccaggatggtgctggatgcatcctaggtatctctctcccttttagttaatgctgtctgcccttgcacacaaacccagaggcagcttttctgacctaagaaattctctgtctcatcaagttcaggctgtgttggttttcttgttgctatgacaaaaagtaaacttaccagtatgtgatttgctctcttactgctgtgacatgagtaacttgagaaaagagttgatttggctcacagtttgcgggctcaccttatctcagtagggcaagcatgcagtggcatctggttacattgtatccatagtcaggacagaagccaggcagctggtcacatagtgtccgtagtcaggaagcagaaagaaatgaattctgctgctcagctcactttctcttttgtattcaatccaggacccccagcctgtgggacagactcacccgcatttagggaggtcttcccacctcagtctaatctagaaaactctcttataggcatttccagaggcctatctcctaagcagttctcgatcctgtagagttgaccatcatacagaggaaggacttgtgggccagaccatgtagccagaggaacatttgtgctgtcatcctcaatagtttctgatgagaaaaaaaggcaggcttagagcagacaggtcacctatccaagtttagaccgtagacagatccagctgctccgaagtcgggtcttcccaccctcctcacctcaaaccccgctgcctgtgactgttaatcttgattgttgtcttgacaagatctagaatcacctaggagacacacctccagccttgtctgtgaggggtatctagattaggttgactgaggtgggaagatccaccttaaacttgggtggcaccattccctaggctagagtcctgtactgaatgaaaaaaagaaaaaaggaagaaaaacagaaagaaaaccaagtgccagcattcatctctctctgcttcctgaccgtggatacactgtgaccatcaggctcctgccaccataccttccctgccatgatggactgtgttccgttagactgtgagccagaatcatcctttcctcctttaaatgcctttgtcaggtgttttgtcaaaccactaagggaagaaacctatataccagccgtgtgtgtctgtgtgtgtgtgtgtgtatatacacccctcctgaagaaacccatgtctgactcccccggacccctctcttgggactactaagactgcctgcctgcccatgctacagtgtccctggaagtacttgctgccttcaatgtcacctgctccccaaccaccatgccagaggcagctcttctgtgcctcaaacaatacacatcagttccaggtcccaactcacttccctttgctccacatctatcctggggagaattctctggaaggaggaagtagtggaccaatgctgcatcccttccaggtagtcatcaacagtctctgcttctcacattcaagcagcagtctagctcagggcccagagcagtagtaatggttctgactggcagcagtcaagctggattcactcgtgtgtgttatgcatgtatttatgtatgtgtgcatgcatatgtatgcacatgtatgtatatatgtatatacacgtgtgtacatatgtgtttgtacaggagtgtaggtacatacctgtgactgaatacgtatggtattcagagagcagctagtttctctttctatcatgtgggtcctggggattgaactcaggtcatcaggcttggcagcaagcaccttgacctgctgaaccatctcacttactcattcctatcataaccaccctctgagcatcccacacaaggcagcctaaagtgctcaggggcttttacggaagcagagctttggtttcaaacaactgtggtttcataagtgaacttgtatgtctgagtgatgaccctgccttttgctggctgtgtgacctttaggacagtactcaacctctctgaactctagcctttaagcattgtggcatggtatggaaacctgggaaccattgtgaggaaactcaggttcatatcccagctatggttccagctcacctgcccacagagagactctggagaccgtgcctggcctggcaaattccctcttcgtgtttacttagcgtgcttgcagctcccatgtgagtttctagaggcatctggtcagctatgggatagagcttagagagtagatgttctctctgggtcccctcttgatcaaatatgtaatgtttacctctgtgagcctcagggaaaaagcagtttgtagatgccttttcatggaggcctgagtctgaacaccaatgttacaagacagggagaaaaataagtctgtcaaaatccaggccacaggaggcagaacctcgctccaaacaagacgtgcatgaaagagccttgtccatgatatttgcatgagctcaattctagtataagacccacgctggggctggggctggggctggggctggggctggggctggggcatagctcaggtagcacttgctcagaatatctaagtctctagcatatatcttcaacaccatgcaacacctgtttatttgagacagcctcatgtagcgcagagtggcctggattggatgaccttgaactccacattcttctgcctccatctcccaagtgctgggatcatatgcatgtgctactatgtctgggtcacaccatgcttggattgaacccaggccctcctgtatgctcagcaagcactccacacctctaaggtctgaggttggagtttgctgtttggtagaaattgagcttcctccagatggtggagaagccgtctcctaccctgacccccgataccacccagccaccaacagggactcagctgtgattgaattcttcttacacatggaccagtctttggtgggtttttctcggtctctgccagccacctgtgtcacaccgtcacacatggctcatatttagcaactctggtcatggtcttggtttccaaaatttcaaagctattttataagtctgacaatcactttggcaagcacaaaaagaggcaaattctgggattttgatgggaagtgaattaaatgacaaactgatttagggattgctgatgctttcctcctgtccccatttccgcttcaggaattggctggcgcccgttcacatcctgtggtagggctggcagtgttctccatgcagactgctcagatagtcgctgccaacaggttttcctgcagtttattacgaagaggctgtaatgacatgtccctgccctgctcatagctgctcgaagcctgaggcagaggctcacatccctgctgacatgctgtcaatcttagttcagcaagagccaccctggggccagggcacgctcaggtagagcgcttgcttagaatatctaagtctctagcgtgtatcttcaacactgcaaaagcagggctggcaagatgacttggtgggtaaaggacttgcggagcatgcatgaagacccgagttccatcaccagaacacagaggaggggggagaagagggagagggagagcgggagtgggagggggaggggagagggagagagcttaacattgtggcatgtgctcaaatcccagcactggggatgcagacaggcttgatcttacggctcagtggctgtccagcctagcctagattacttggcaagctccaggccagggagagaccctgacacaaaaaatcaagatggacattgcctgaggaacaacactaaaggttgtcctctgacacacacacacacacacacacacaaaacaaccgcatatattcttatattcacacatactcatgaatgcacgttatgtatgtgtacatacaaggggtggcctttcagtcctctagagaggagataggatgtgccctcttccactcaagggaattcggtactaagtgtccacaagcagctgaagtgtctttggctccacaaattttcccagaagagcagaggcacacacacacacacacttgatgttagctattactcaggcccagtagggttctgtggcttttgaggtacacggcaggcactgtggatggcagcaaagtcccttgaaactgtgaacctgctgttacttcacagcttttcagaaagttattacatcctaaatttttcttttgtgtatggaggacgcacgtgtgccacagtgtgcttgtgaagatcagagaacgactttcaggagtcggctccctccttccactgtgtgggtcccagggatcaaacccaggtcatcaggcttggtggcaggctttagttttttaattatgtgtctttgtgtgtgttagtatgtggatatgtgcacctgagtgcagtgcttatagaagccagaagagggcaccagatcccctggagctggagttgtagacaattaggagccactggatgtgaatggtggaccagaacttgggttctctgcaagagccaccaatcctcttaaccaccacataagctgtgtgtgatgacatcacctgtagccccagcatctgggaggaggcaggaggagcatcaggagtcaaaggtcatcctcagccacacagtgaatttgtggccagcctggactatgccaggctctaaatgagaacaaaaatcacactgtaaaatgtgggtcttacctttccactgctcctacaggttcttttaattactcttggttgaaaagaggaaaagaaccacacttctggctgtttcagctccctctagtgacacattaaaccagtcctagagcccattaagtgcaattaaaaggattcagaactgtgctagttagaatatgtgtttataatgaagaaagtggctgtcactcaggggcaatgatcacagttaccacacgtcccaggactccactatcccatcaggttcactacctccaggttcacagtgcttaggtaacctttaacccagcatacctgtgaaatcacaggtaccacagggggtcccagtcagtcaatctacccatgctatatgtagacaggacaaagtattgaatcaggaatatgggatgagtgtcccctgagagccgcctgtccccacagacaccctagagggaacactagactccattatatacaggctctgacctcagagggaagcaagctaattgttgtcatgagtctggagccagagtgctaaataaacaggaagaaaggttgagactgtgaagtgggggtgtcacagtgttcccagagctcagtcctagtgaacagaagaaggcatggtgatagaagagaggagaagaaagaaagatggctctctactcctgagccatgtccccagccccttactgggggattctaggcaggggctctaccactgagccatgccccagcccctcactgggggattctagacaggggctctaccactgagtcacatccccagcccctcactgggggattctaggcaggggctctaccactgagccacaccctagcaacaggatctttgtagtcttttctcttctctttttctagatttctgggctccaaagccttacactagtatggctctgctgaagagccattagaccctggactctatccctgacgggctttatcccattcatctacccacccccacccccctttttttttcctattaccctagtcaggatctacaaacttgacctaagagccaaagccagtccgatgcctgttcttagagataaagctttgctgaaacagttccacctttctctataaggcttaagtcagtggttctcatctttcctaatgctgtggccctttaatacagtttctcatgttgtggtggcccccaaccataacattatttttgttgctacttcataactataattttactactgtgatgaatcataacataaatatctgtgtttcccaatggtcttagatgacccctgtgaaacagtcattccacccctaaaagggttctgactcataggttgaaagccaccagcttaatcagtctgaactggagtaattttgccataacagtcaatgctgactgaaatcagtgtaactccaagattcacagccctcaaagcttaaaacattacctggcccttccagaagtttctacttcaactgtaggggaacaacttgggtttgggagtcaaacagatccgagttgaaatctagaccatcctagggtaaatgatgtaaatctacctgagcctccaagctgtccaatgaggataaggtatttcttcagcaccatgagtctcttgagggaccaggaactgccttgctcatgtaatgtaatcatgatctgtcagacctgggtctcactgtgatgagaaactcatggtacaggcaatggaggagaagaagaaggaggaggaggaggaggaggagaaggagaaggaggagaaggagaaaggtggacggggaggaagaagaagagaagaggaggaagaggaggaagagtaaacccaacttagaagaactggagtctggctttcagctttgcttatcttacatgggcaataatcgctattgagcctaatcccccagtgcagaagcaagaaaataaagttcattacagtagaaccaaaggctgagtttctctgcagggcagagggttcagagctgactttgaacacttatgtgtctataaaggaccagatgtggtggctgccatctttaattccagataattccagcggccgagacaggggaggtcagggccttgaggtgaggctacatcacagggaagaaagaaaaagaagaacctgccattctggataatctgaggaaagactctgctgctgagccctacttctagcttctcacattactttcagattattgctaaatcactgatcacaaaaactagtatcagcaaccttgtgtggcttgccacagtccagtgtggcttcagccaaagcaggggcctcgtgtgactaagagcaagttataagaagcagggatcctcggtgttccctgggatagccctagcaacagttggtgcctgatgtggcctaggatctccctgtcaacagtgaatgggcagaatgacctgggggtcggggggctggcaatagtgggtgtccagagtggcttaggatagtcttagcagcagaaggtacctagtgtgaagcttcccctagaaactatattagtcactttcctgtcgctgtgagagagtacctggcaaaagccacttgagaaagaaaggtttattctgggcttacagtctgagggtgcacagtcgatcatggtgggaaggcatggcggcaggagtgtgaggcagctggtcacagtggatccacagtcaggaagcagagagagagggatgctggtgctctgcttgcattctcctttttattcagtcttggaccccagaccagggaatggtgtcacctatatttagggtgactctgtgaattagataattccttacagacacatccaaaggtttgtctcctatattcttctgggtcctgttgagttgatgaaccatactgaccatcagagatactctacaggtcagatgggcaggtcagatcgttggatgacctccccgcacacagtagatgttttaagcaagagctctcagaatcaagtgaataaatatccacctccctacaggattaattccagggctctgagaggttccttgggacaggaaggctccactgtcttgacaaagaccaagtgaagtcacctgttctcattaatgtttgttgacaccttgcacagactagacctgagataggggagccacaacttaagaactgtctccaccaggttgtccaatggacacgtctgtgggcatttccttgattgctaatttcagtgctgcctttgaacgttgaagtgtctatacaggaccagatatggtgggtggtcctcagttgtgtaagaaggctgtttgaacaggagctagtaagcagctcctctaagatctgtagttcctacctcagctccccttggcagcagactgtaagctgcaagatgaagtgaaccttttcctccctggttgctcttgctcattatggccatcacagcagcagaaagcaaaccagaatacaccatccactttcgtgaccctgcacatgccaggagctgccagtagcacatagcccacatgtcctgtgtgtgtttgccacgacaagattctctctttcctttcctttcctttcctttcctttcctttcctttcctttcctttcctttccttttctttctttctttcttttttctttttcttttcttttttctttctttctttttttttttttttgagacagggtttctctgtgtagccctggctgtcctggaactcactctgtagaccaggctggcctcgaattcaaaatccacctgcctctgcctcccaagtgctgggattgaaggcttgagccaccactcggcttttcttttttttttttcaagtttattaatcaaactgagatctccatgcatgtgtgctttactgactgagccatctcccctggcttggtggccattcttagtctacagctgatggccacctgggtgtggtaagccctcctgggaggctggatgaaagacaggatggctgacagtcagcacccactgctcttcatacaaacagtcgggctagtgaaggccaggcagaagactctgggtttttttgttttttgggtttttttgttttgttttgttttgtttttttttttttttttttgtttttctttttttgttttttgttttgttttgttttgttttgttttgttttgttttgttttgtttgaggcagggtttctctgtgttgccctagctgtcctggaactcactctgtagaccaggctggccttgaactcagaaatctgcctgcctctgcctcccaagtgctgggattaaaggtgtgtgccaccactgcccggccaggaaactctcttgcagggactcccaatgcagtcagcaagaaagccagaaatttctagaaacttccagagttttactatgcctgtcagttgcagagtgccccagaagttcctagggtttccttatcaataacttgaggagatatgtctctgaggccacgtagcatcaaggcaagggtgagggagcgattcggccattcgatgctggtgttgtcactactctgtagacatgcagagccaatctcaatcgtggccatggccttcctgttctacacgtaatgctgcttataggcattatatcagcagatgctgtagaaaactgctggtcaaaatgctttaagaaaacaatttcatgcattaaaatatatgccaggggctggggagatggctcagtcagttcaaatgcttgccatgaaagcaagaaggcctgtgttcagtccccagcagccacatacaagttggtgcactaaggcatattagtaacctcagcaggagaggggctaagccaggagcatccctggagatccatgctgaactacctagccagtcagctcctgggtcagtgagaactatcttagggtttctattgctgtgaagagacaccatgaccatgggaactctaataaaaaaaaaaaacatgtaattggggctgacttacagtttcagaggttcaatcccttgtcattgtgccaggaagcatggcagtgtgcatgcaggcagacatggtgctggagaaggagctgaaggtttgacatctgaatcagcaaacagcagggagagagattgtgagccactggcctgacttgagcatctgagacctcaaagcctgcccccagtgacgtacttcctccagcaaggccacacctcctagtagtgccactccctgtgagcctctgggggccattttccttcaaatgcccacagagacccagtctcaaaaaataaggtggagggaaactcacaaagagacctgacctctgacttctacatacgtatgtgcaggcacacccacatatccgtgcgcacacacacataaacatatacacacactacacatacacacaggctaatatttatgtgcatcttacaccatgaatatctagataggagaacagacaaaggctggcctgtcaatttaccagcttctgagctgcacacactttcattgggcaatgcttatattcaggagagcagcatgttaaattctccaggcaggctggaagccctgaagctcacaagagccaaaaataaataaataaataaataaataaataaataaataaataaatattgtaaaaaataaaaataaagaaagaaaacaaaaaagtattaaattctagattgtagtaccctgttttcatctatttcctcccaacatgtgccaaccatatcctgttacctgtaatatctttgtggcataaaaaaaaacaggctgtagtacaggtgacgtaggcatatctcagctgggagcttcatttagtttctttccacccaaccaagaggcaacggagactctgagccttagtgatcaccctgtgcatggctcacccaccacctgctacagatggactctcacggccagggctgtcctggctttgccaggcaatggaaagccagccctaggaggatcgaggagggctgtgtgcaccagcctaccagaataacggccatgctcaattccgcctttcatgattttaattgtacaacagtaattttgtgatccagttgccgacggcaaacatgcagaagacattaactttatttatgttttggattattaatgcggctgttaaaattcctccagttagttttgattgaattgtttttttgtgtgattctgttgtttaatggagcggtaaataagaatttctgataatgaggcccagcatctgtcacaacaacctggtgtgggctattaacatttccattagcggcagggtgggcagcgataatacagaagcacacagttagaacaaaataaatagtcgtgtcaggctgagcgggtgttaattactattttattctgcatgggtggggggagagagcaggaagcaggggagggagctgcgagcaaggggtgacctactgctcacgaggttgccttatctctccaaaagagcccttgccagagaaaaatctccttaggcagtgatggctctatggcctccgttgatggcctctagacagactctaatcaaaagacagccagcagggtgtggggaggtgactcagccactaagctacttgctacacacacacacacacacacacacacacacacacacacacacacagagcttaaggagctgattttggatccccagcacctatatgaaagcctccatcttcccagaggtggaggtgagaggagacaggtggatttctgagagctcattggctggctagtccatcaatcacttagttccagattcaatgagagaccttgcctcaaaaaaaaataagtggagagtgagatcatagagaacacctgaagtagacttctacacaggtacacacacacacacatccaaaggtgaagagtgatcaatgaagacaccaacattgacctctgaccttcacacatacctgcacacatacaaacatatatacatacacaagcctatgtacagatgtgcatacacatgaagatatacttactacacacatgtatactgtgttctcactgtttgatcttgcagcttgtgccgtgtggtttctggatagtgtctttctttcaacactggctaactgtatctcagcagaaccagtgttctttataactctgtgtcgtttgttctgtgcatgtataagaaggttcttctgagagggcttgtagccttccttggcataaagggactaagaattgcatgggatacagcccaaggcttggaatgtggttacacctgaggccccccaaactttggtggtgtccagggtatttaatttcccacactctccatcacagaactatgtcccgtgtgagcctggaagacatgggtttgtgggtctcagccagcttacaggaggccaccccagttactctcctgtttctctctgtcctcagccccagcgatggccccacagaatgtccaggtgaccccactcacggccagccagctggaggtcacatgggacccaccgcccccagagagccagaatgggaacatccagggttataaggcaagttctcctgcgtggctgggctcttcttccagctcactgtgtgcccagggccccgaaggctttggcggcacactggctacatgctgctctgctgtgtccccagcagcatacactcagcacagaagcaggccccagtgcctggagcaggcttgctgggaccaacacctgagacaaaagctgctcagagaaaagccacacagaacatgggctgctgtgtgcccaaccacaaaacaccagggaatgcttggttcccccaaaggtccaccaaggaacctgacctcttccggggcatttgctgatagtaataaaggtggagtgtcctcacaaaggccggttacaaatcccaatactgtctcctgcacatggagggactctcatttccataggtatggggtagaaccagagaacttgtatgtggaggtggggttggggtatgtggtatatgtgtgtattatgtgtgtggtatgtagggcgtgtgtgtgtgtgtgtgtgtgtgtgtgtgtgtgtgtgtggtgtggagtgaacaatgtatgtggtgtgtgtggtatgtgtgctgtgtgtgctatgtgtgtatggtgtgtatatgtgtggtatgnnnnnnnnnnnnnnnnnnnntgtgtgtgtgtatgtgtgtatgtgtgtgttatgtatagtgagtggaggctatgtgtgtgagcagtgtgtgtctatgtgtgggtgctcagaaggtcactttgactaggctgctcttcaggccttaagcagtcaacatttttttttcttttggggaggcgggggtgggcagagacaaggtttcttcttggccagaacctcacctctttgataagtccggctggccaccaagccccagggatcctcctgcctctatctccccagcactggaaactcaagcaaaaaaataaaataaaaataaaaataaaacatatttttaactcagatccttagacctgcacagctgtgccatgtcctgagccctaggagctacatttgtatcaagtccccacgtggtgtgacttctgggaacctcatgttgagaccagctcacgacaaagccatagagtatcctttagccagatgatctagagatggaaggaaaggaagaccactcaccttgccaggcagcactgagggaaacagctcctgtaggcaggcttccccctgctaccctcttctctgcaccctcccctactaagggcactaaggaactcccagcattgcctagcctgcctggagacatccgtctggtgtctccatccctccagaagtaatttccttgtctggcctccatgagtcctacctgatcagttatcccaatctcagtccatcctgccctgatgaatattggcccaattaaatgtccatttcagagtgattttggtaggtgtattatgaaaatgaatacctccctgccggcagcgctcttacgaagacgaatgaggtcacagagagcccctcgagctctaaggcaaggcattatttatgcacatccaaaaaaatatgttttctcatttccctaatgataaagacattgaacttggatattgatcacaagttagcgtggcctgtctgagcggaggctttcccacagtaagcacagccatcaggcatgcagccggggcctgcgggtggaaatctgcatgctctcttcgtagacaggctccagcacaggggtgacccatgaggctggatgcccccactgcctcctgcacagctcttacagaaggcacactgctctgggggcctggcacaggctcatgtgcacagagccgaggggtaccttccagccagtattgtctttgggcagcccagctggcacaggctgggggcagtggttgccagacagctgtttaacagtctggttctgctaatccctcaaacctttatgcttggacttcagatctacctgtaagcatatcaaagctaggtgagaagaaatgttacttaaggggagggaacgaggtgctttccccacagtctcagcttaggactctttcttggtgtgtgtgtgtgtgtgtgtgtgtgtgtgtgtgtgtttgtatgtgtgcacatcctatatatgtgtatgtgcttatgttttggagtcagagcacaacccaggtcttgtttctcaggttccctccaccttttaaaactttattcttaaattgtgtctggatatatacacatcagcactggtacccatgggagccagaagagggcaccagaactcctggagcagctgcgagctcccagatatgggtgctgggatctgttcattgctgaaccatctctttaggcccctcccaaccttgtgtgtcgagacagactgtcttgctggcctgtcagctacgctgagccccagggatctgcctgcctccacctccccacagctgggattcgaagcatgcaacctcagatgtggctttctgtttttaaacattggatgttgtccattgtcccattgccttcctgttgattttggtgtttttactacattgctacattgacggaacacgtagatgttggctttgaacgaaatgtggggatgtggagtgaactttggggcttggcctatccatacatagagggtactcaatgtctggatcacagggcagaaccccgggcaccatttaccacataagcctgatccccaaggtccattctgtccacactaagcttggtgtagttcagcctaccctgtgctctgcccaacaggtttactactgggaggcagacagtcgcaatgagacagagaaaatgaaggtcctcttcctccccgagcctgtggtgaagatcaaggatctcaccagccacacaaagtacctgatcagcatctcagccttcaatgctgctggtgatgggcccaagagtgacccgtgccaaggacgcacacatcaggcgggtaggtcaccctgcctgttctgtcatagcaccaagagccagtggtatagctcattcaggagagtccttagtctaggccctgggttctaacccagtacctcagagtctggcgaattgtggtgcttgtttttaatctaagcacctgggagataggaggatactaagttcaaagtcatccttagcaagatattaagaaccaagccaacctgacttacacgagacgctggggaaaaaaaaaaaggaatgaaggaaaaagagagagggggaagaaagagggaaagaacttgaagtttggaggagtaaaggggtgacttcctattgctcccagggcctgtgtggtactaaggttgtcttgacgcagcgtattttcttgtaagcctgcagctaggtcttctcctgacccagagttccttttggtgttctctcttagaactgtcctatgtgtgcatggaggctagggcccagtccccaactctagcccgaggccccgacccccagccaggcccaggctttctctgttcccagtcacgttccctagaccatgcctggaataaatagctcagcagctgccactcagacatctgcctccctcttacagggtttatttacttctcctcttgctatgataaaaagtaccccagcaaaagtggcttcgggatgacagggagggaatgtttaggctcatggttccaagggaaacactctattatcacagggacacatggtggcaggggcatgaagttgaggccctggtcactttgcatctgcagtcaggaagcacagtgaacataaagtagggccaagctagacagcctcaaggcttgactgcagtgacttggtccctccacctcctaaaggttctacagccttcctgaacagcgccatctgctggcattgagagtccaaacacttgagcccgtggaggacatttcccacctaaaccaccacaggagctgtgctgacaggatggccctgctaagagccatctacacacagggcacaccctctatctgcagcaggcctctcaccactcagcccaaaagagcagtgatgttgccagaaaatggcaggaaaggtcctatgttaagaaccaggaagttagctaggtgtggtggtggcatattctttaatcccagatttaatctgcacttgggaggcagagagaagcaagtggatctctgagtttgaggccagcctggtctacaggggagttccaggacagccagagctacacaaagagaccctatcttggagaaaaggaaaggaaaggaaaacaggaaggctaaggtggaagagtggggccttagagcctgctgggcaaaatcacagggcctagcactctgtaacattccatggctgagccctggtcagggctcttggtgttacgtcctggtacgtgtctatgagcagagagtcatgactgtccccttgctgctgtgttgggcgcccagacagcccagtcctcctgttttgcagttagggactggagctgtatggatgtcagtagatttgtagggaagagagcaatggctgggccattttgaggaaccagggcctggtagatcagggatgtagcaaggggagactggacatggctgcagttaggcactcagaggagaccggaagcctagtgggatgtctgtaagggtagccctacacactccctcctgcacaaccctgatgaatgaacaagccccacatgactgcaccccgggcttctgtacatgccaacagccttgaggagttggtcaggtttctccctgtctccgcctgactggtctctgtgaacccagagtatcaggggaattccgagttgaagaatcagtgtgatagcagtcaccaccactgccacccacacacnnnnnnnnnnnnnnnnnnnnnnnnnnnnnnnnnnnnnnnnnnnnnnnnnnnnnnnnnnnnnnnnnnnnnnnnnnnnnnnnnnnnnnnnnnnnnnnnnnnnnnnnnnnnnnnnnnnnnnnnnnnnnnnnnnnnnnnnnnnnncacacccacccaccccaacccacccacactcactcccacccaccactactacccacaacacggccccattcccccatccccacccccacggttgagaagggttagaaggagaaaggagaagggaagggaagatagatgaaatggggaggggaggaggaaaggtgaagtatagaaaggagaaaagggggaagagagaggcaaaatggggaaagattggggagaagaggaggggtgtgggaaaagaaagggaggtgagaggaaacccatgcaccatggtgcttcctctttccctaaaagcagggcccagcatccccaaagcctctggagatggagctgctgccgctactttattgtctgttcacatctgcaattcattctggtcttccagctcacagctgtggttcagctccagcatcctccgtggtcttctgggaggggccatgcttcttgtggatcccaagaagctggcagctgctcagtgtgtcccatctctctggcactggttacactgctgcaatgtggataacactgagctccacctgtcccgtggggtggtacggtcctgggtgggcaatccgaaatgggctggtcttcactctgcacacctgtgctctactttcccagctccagggccccccagcttcttggcattctcagaaataacttctaccacactcaacgtatcctggggagagccatcagctgccaacggcatcctacagggctatcgagtggtgtatgagcccttagcaccagtgcaaggtaaggtgggggcgtggcatagtgggctctactacaggagccacagagccagagctgcctagtcgagcttgcaagaagctgagaaggtgggatggagggactggggagatggctcagctgctagtacttgaagtgcaagcataagagcccaaatggagctcctaggacccatgaaaacaccctagctgtggtgctgctcagtcctagtgctggcgagctagaaacaggcctggggcttgctgaccaaaggactagatgaactggtgggttcccggtggaaagtgagagactctagagctggctggtaaacaccatggcctgaaaaacacgggttaaaaagtaggtcgttgttcccacaagaacatgcttgcagatcagaaatagatgggtcacgggatggggtgcttcgggaaagctgatccagggaccctacaggaactggcaggagagatcagtggtgattccaactagtattcttcttgggggggcttgaaggtcagcaggaagtggcagattaaagatgtggcctcaaaagacctagtcaaataccaggtacctggttgtcagctctgcctctgggtgttatttgagttctgttgtggttgcatcttttatccacatattcctgtgaccactgagggctctgtggcctttcttcctcaccctactgtgtactcagagtcacgtccagccaggttcaaatctcacctcaccctggtcatatacacagatacatagcaaaacacagagttaatatctaggaggaaacaatacagaagcagccagccagataataatggctttccatttaaagccatggtcaagagtttcctttggaaagctgtcacatggagtgggaagtcagtatgaaagggaacattcaagccctcgattttattacaccgaatctccgatgcttttgacaagaagatttgccatagctttatgatactctaagaaagacagaatgctcaccataaactatggccttaggcttttgcaccgtcagttctgagctgcatcccaaatcagagctgggaaagcgagagaaagaaaaagccaagggtttctgggcccaccgatgagcttcgtgcatggtggaggaggtggtctgtagaccgggctctaagagtctaaaatggcactggacaggcggtggacagtgactgctgcagtcctgctgggtggctctctttccagtgtgagcaacaagtggcttgtgtggggctaccttcaaaatccaaggacagatttccagtagacacgcccattgttcttgcatgctcagcagagaggggatgggagacttcctgaagaccttcctatctgttcaggagggttccttcccaactcgcacgagcacccagcaaacagttggagccattcaattaagaagtgactgtcaggatcatggctctccttgacctgtgtgcccttcgtaatcaaaggtagctttagtatctcattcatcctcaaacaagcaactgactcccctgcatcctgtgttctatgtcctgtgttaatgacttcctgaatctcctagaaccctgtggcacatactgcccttacctaacgctaataactgccctccaaagactgtcccagagattgtcattccttagtgggatctatgccattgggaacttgcattcttttggggattccctctctctgtatgccccgccctccacctggctttctgcaaagttccaacagcttttcctcccagccagctgaccccaggtctctagttttcctgcattgccagagctaggagtacttggtcatcttttacaacaatgtgttctgtcatattcaatccctgtagacatgaccccatcgggcatcatctgaacgatgggcagtgtttattgagcacttactgtgtaccctgcacagcgctacccccctgccacctggcatcccggcatctgtgcccgtgtgtacattgagagacggctcagtcagtaaagtacttgccttgcaagcgtgaggatatgagttcagtccctagcattcacataaaagcatggctgtggtgacacttatttataatcccagcactggggggggggtgggggggcgagacaggatccctggtatactatagccaaccagcctagcctgctcagatagcctcagtacctgtaggaggtactatatcaaagtcatgatggcaacaccagaggaaatatacccaatatacccaacattgttgtggctcctacacacacacatgaatacctgtgtacatacatgatagcctcccccaccacacatgtacacacacacactgagcttattaaagcccatcttttcaaaattgcattttaactttgttttaacacacacatatgcacatgcatgcacaccctgtggcacggcatgcctatgaaaatcagaaagcagcttccaggaggtcacaggcttggcagcaaatgcctttatctatcaggccatctcaagggccccgagagccctccattcatttactccagccctggccttctagactgacagaggggggtgtgacttgaacccaggcagtccagtgcatgtgcagcattctgaagcatgagtgaggtggggaaagaagtaggaagcatgtgttcccgatagcctgcgttggagtctaagtgccaggcgctagccacacagccaggggtgtgcgacagctagtagagtcacttcagttgcacctattttcacctcttttcataagtgacaaggtgttctgtcactgccatcgcctctccgtgtacagatagggtctggctccttcatctgtgctaggaacaaagacgggaggacaggatagtgactccatggccccttattggctctgcaggtcaaggacagccaggcctcagcacacagttcaaggacaagttatccagatgcccacatccttgcttttgcttttgttctgagtcagaatttaccaggtatcccaagctagactcaaaacttactctgtaccccaggttagcctcagactcactctgtagccctgggtttggaccattcacagacctgacccatccctacatccacctagatgtctatcatggttgatccaaggctcagtcttccagcatgtcagtgaccagagcacacagcccagccagtagaactacagagttgcctgtagacagcagcaactaagccatgaggcccatgaatagccctgcaagacagaggtgatcatgacctccccactcaaacctcacagcttactctgattgtggctgcctgactcacatgagtgaaagctcagccagtgaggcacgcagagatcaacagctatctaaacacaggacacattagagccctacttacctatacacacacgcaaacatatatgcataagcatacatgcacacaagcacacacacacacacacacacacacacacacatgaacaaggcctgcaaggtgacccagaacctcccttgccttgactgacagtcagctgagcatccctgtgttgctcagtcattccagctgagcctcgctgtatgacaaagaccaagacctgatccagtatcaactatataagcccatcagaggtggactagaagacacaagacccaggccaaatggtacttgtgtggttttgagaaagaatcttactgatctaactcgtgtagtacaggttagcctaagtgtggctcaggctagccttgttgttttagtaatcatcttcagataccaacagggtccttttgagccagtaggctgtggaatgggttacagccggggacaggaggggagggtcataagttgcatctcagaaacccttctcctccagggacacagtggtcccaacaacgataacctagtggggcccttgctgctcactgagctgacagtttatctcaactccctgtggaaggtatcaacctcagaaagcctggaaggctgagcctggtgaagcaagtgctactcctaagccactcaggagactgaagcaggtgtgcaagcaagttcaaggaccagctggactacagagagttgaaggccaccctggacaacttcatgacatactgtctcaaatgaaaaaagaaaaaagagagttagggcgtggctcagtggtagaacccctgcctagaatcccccagtgaggggctgggggtatggctcagtgatagagcccctgcctagaatcccccagtgaggggctgggggtgtggctcagtgatagagcacctgccttgatatgttaggcctgggttccatctctagtacttgaaagaaagaaagaaagaaagaaagaaagaaagaaagaaagaaagaaagaaagaaagaaagaaagaaagaaagaaagagaagagagagagagagagagaaagaaagaaagaaagaaagaaagaaagaaagaaagaaagaaagaaagaaagaaagaaagaaagaaagaaaggaaggaaggaagaaagaaaaaggaaggaagagagggaaagaaatttaaaccatcagccaaggaaacagaacaatgttacctgaggctaagacttcccacctgctgacctaggactgcaaacttctaagagacccactcttggctgagcagcagacaggaagtacttgtctttgctcttctctgccctctgttctcacatatctcagtattcctcctgccactgtcaggaatggagaaagcaagcattcagctgggtacaccaggatcactaacccatgggagcactgcctcactaggaccatcaccctactaggagcaccacttcactaagaccttactgaaagtagccatactccattgggaagaccatcatactggagcaccacccacaccaagagtaccacatgattgggaaatctccactgggaagagcacctcactggagctctacacccgtgggagcacaacacctcttgaaatattaccgaactggagcactgcttccctgggagtaactaaccaccgagaagttggaatattgggagcaatcaccctgctgggggacattgcaccagcttagtaccccaccactgggagcaccagtcatcagagtatcatactactaggggcattatgcttcctaaacatcacacactggagttccacccaatcatgtcactgtaggactcagtgctgtgtctcgcagaccccatgccgcccagagcactgagctgcacggagcactaagccatttgagcactgagccatttgagcactgagccatgttttagggaatctgattttatggcagagatatttttatgtttcttaaatatgttttaaactgtagtattttatgagattgtaccccaaggctttgtagtgcagggcatggttttaaaattgagcaaataaataaaattctgacacacttgagatggagggaaggccagtctggctcttcctcctggtggaatcaactatacaaagtccctaaatgagtttatgtctgctccagagagaactaagcatctccaaacacagaaggtaccacttcagaacaaccttatatctgagaggtccccagcagtgacagtcgccctgtgtcacccaccatctttgtaacctctttctttattagtgtgtatgaaggtagggtccagttcttcgggcagaaatgaacacaatttttttcttcagatcccacctcccatgaggagagtcaaacagaagttgtttaaatcacgctgaaataattcagaaggcaataattcagccgacacgaacttgtattgaagatataatctgaacataatgaaccagctaagaggcattttggagacctggggactacagatccatgctctgatggcctggaacaacggatcatttttaataagatggctctttggttcctttgcaagcccatgtggtattaaagggaccagacttcactatgtttccttcatactgagggcaggctgtgggcagcagtgctaggcaggatgcaccatcccctatcagccatctcaataatcagactgaagtttgttcagtgtatccattgcagttatcaatgttccagggacacacatctgctgtcctggaagacatgaaagaagtacttcttcatgtcatctcagatgtataggcagagatgagtgaacactcagggaagtcttacagctgagagcttacctaacttaaaaaataaacattgcatggatttcaaacatatggaaacaaagaacctcatctgcccccttgggaaatgtgtgtttatataatttaagtgtttatcctttccactaaatgttaaatctcactgcctaattgtgtagtggtgttcattattctttgattctttctctgtaatatcatttcctggaaatcagccacaattcaaatatattaaattggggaactaaaccatctataagctttagaatgtgcacaagctcaagtagggcaactaattctccctccatcttcccccatcttgaccaagatgtgaattgtctttgtccagagtatcaatgctatatgcactaccctcctgttagccattcagtggctgtctcagtcaccaggtcaattgtttagcatattcatgcccaatgtgttatcttcccattagctatctcaattataagatagtttcccagcatatccatgctgtatacactaccctctcactatttactcagtagctatcttagtaaccagactgaagtttggtcagtgtatccatgaagtgtatcttaccctccccttagtcactcagtagctatctcagtaaccagactgaagtttggtcagctgtccatgcagtgtatcttacaatgtcattagttactcagtagccatctcagtaatcagactgaagtttgttcattgtatccatgcagtgaatcttacccttccattagtaactggctcagtaatcaaactgaagtttcagtgtacccatcagaggatcttaccatctcattagccactctggctgtattggtggtcagatggactatcactgctattgtacaatgcttatatttatttcaaccttattttacttaataaaggctcaatagttgttttaaaataatacacaaagagtgccagcattataccatgaaaaggacagattaactctggttctatgggaaagtcatgtgtatggtgtatatgtgcctatatacattcacatacatatatcctcagtttcaggaaaaaaatcaggggtcctgaaacatatccatgaataagggaattccagttcttaatggaatatatgattttgtttgtgtatttctgtacagaaacattgtcttgtatggtccttattctctgaacaaagggccattacccagaggcacagatttaacaccatcttacctgggtgacgttcccaaaagttgtctgaggcttgcaagtcatatgcatgccagctgggtcatgctccagaccagtcattaggagaggctcacctttgaactgagtccagcctcttccataccctgccttccatattggctaagcagcctctgtgcagtcagcctgttagtgaggcaggattctgcaatagctggaagcagagcaggaagagggtggtctccaggatatagtctgggagcactctctgagcacttcctcccttgcccactgccttcagtgaggtctgggccattccctttgtgactgtcacaggcttggtggtttcttggacaaagtcacttatcaagtttaaactctaattatacttatctgggatgaaaattggctggatcaccgtttaaagtcctcctaattgtaagcaatgctcctttagtgagccaccagggctgtctcctttcttatcactacagatcaggcatgctcaattgcttctccaagctcagcctcctcttccccgtgcttttgtggccattgcaggcgtgagcaaggtggtgaccgtggacgtgaaaggcaactggcaacgttggctgaaggtgcgggacctcaccaagggagtgacctacttcttccgtgtccaggcgcggaccatcgcctacgggccggagctccaagccaatgtcactgcagggccagccgagggtgagtgggctgtactgataaccgagcagagcctcatcgctctcacctgctttggaatcccagcactcaggaggtggagacaggagttcaagtccatcctcactgcagagcttggggccaacctaggctctatgagaccctgtctcaaaaaagttttaaaaatccaaagcaaactacagagaacatgagcttctgtgagcaaaacaaacaaaaacaccttaagaaaaaaataaatgaaaattgtaaacccttttaacatatacagtctttatatgtagcccagactggcctcaaacttgggacaatctttctgcctcagtttcccaagcactaggataataggcatgcaccaccatgtccagctgtgacaggcatgcaccaccatgtccagctgtgaatcatatttttgaaggaaaacaaataagaagcttctagtgttcttgagccatggggcgggggagctgttccaccttcgcagccccttcagtctgcttcattcaccaggaggcagaccactgtttgaagagcagcactgggcaactgctggcctacattgtctctgtcctctgattacttcctgttttgttttggtgtgtgtgtgtgtgcatgcatgtgtgtgtgtgtgtatgtgtatgtgtgtgtgtgtgtgtgtatacctgtggaagccaaaagttgacaccggatgtcttcctgccacataaagttatttgttgctacttcataattgtaattttgctactgttatgaatcaaaatgtaaatatctcatatgcaagatatccagtatgggaccccaaaggagttgtgacccacaggttgagaattgctgatctaagagctctgatgtccttttctgttttctgcaggtaccagcatacatgtgggtgtacatgtgtgcgcgcgcgcacacacacacacacacacacacacacacacacatcatagataggtagatagataataatttaatttcttattatctatctacctaatttctgtcaccactgactgtcctcagtcccctcaaaaccaatatctactctctttgttctttttatcccacagggtccccaggctcaccaagaaatgtccttgtcaccaaatctgcctctgagctgacccttcagtggacagagggaaatgctggtaccacacccactacaggctacgtcatagaagccaggccatcaggtaggagccatggagccatgcactcctggctggaagccagaaccacgcactgcccatatggtggcttcttggccacactgaaggcagttggtccatggggcctctggcctcctctccctgcatttctctagcaaggcatgtgtggaagaggagactcatttcttgttccccttctgagtgcctagtaaccacagctgtgctgttaacctctcgggcattcaatttctgatgccttagccgcgtgacactccgaaagatgataattgtcactctcaggaaagggtagacgagaggcgaaggacactcgaagacatttcagctcatcaggaagatctagaagtgtctcagggactcgtctcaggggtctaatgctggtggcctgtggaaagagcctcactcgcttcagataattacaaacgtccttattaatagagaaaacgacacatcaacttctgtgcctttctggcttctgaaaacgagggctaagctccattcctgagctggggagacggcttgtgagtgaggaggcttgctgtgcaagcatgaggacctgaattcagatctgtagcagaggcagggtgtggctatgtgtgcacctgtacctctaccaccagtgctatgggtggtggagacaggaggatcagtggggactgatggcggctgccagccttgctgcaggctcagtgagagatcctgtctcaagagaataaggcagagagtgacaaagcagggcacttgatatccttctctggcctgtgtgtgtgcacagaactgtaaacagccacacacatggttcataaaccatgtgcccactcacatgtgctcacatgcacccttgcacatgcatacacattcacacacatatgtaccctgtgacacacacacatgtacccacatgtacctacacacacacacacatgcatacacatgagcacacacacatgcacctgtacatgtataacatacacatgcatacatgtgcatacttgcacacatatgcaaccacacacgcatgcatacacatgcacacatgctcacacacacacagatctactcctgccctacctccttccttctgaccttttttatatcttgctcgctttttaaggaatcgttttttttttattatatgtgtacaggtgttttgcttgcatatgtctgtgcactgcatgtgtacctgatgcctgaggaggcaagacaagagcattggtttccctgagaacagagcccccgttaggtgctgggagtgaaacccaggtactatgcaagagtagcagagtttttacctcctgagccatcatcccagccctctctcgctcgttttaaaagaagcattaattgcatattaatgggattcagtgtgatttaattttttgagagtgttccatgcaactcaggttggctttgtactctctgtgtagccaagagtaatcctcctgctcccatctcccgagtgctggagtcataggtgtgcatcatcatgcagggttgtatgtggtggctggaacccagaacttcttgcacgctacacaagctctctcctcctggtcccagcccagcccacagtgtgctatttttctgtgtgctctgtttgtttccttcacacagctgggacagaatttcctgatatgaagaacttcaggaaggaagacttgtcttagctcacagtttggagggttccgtctgtggtcacttggtcctacacatctggctgtatgtggtagcaggagagtgtggtagagggagttgtttacttcatggtagacaggaagcagacggagagacaggaaggcgcctgggacaagggcccacctgtggtgccctacttcctctagctaggtccacctctgaaatagttccaccagctggtcaccaagcattcagtgcacaagcctgtgggaggccggttatatgccaatcacggtgtcacaagagcatgcactgaccactcccaaccacagtatccttagtaactaatactcggcctccatgttgtatttctttgttggtccccacatttgagacagagtgcaaatactcgtgtttctgtgtctgagtatcttaacatggcctcctccagctccattgtgtctgagaatcttaacatggcctcctccagctccattgtgtctgagtatcttaacatgacctcctccagctccatacattttgctacaaatgacagaatttgattcttctttatgcctaagtaatgctccattaagtatttctatcacaacttnnnnnnnnnnnnnnnnnnnnnnnnnnnnnnnnnnnnnnnnnnnntcttccattcatctgctggcagatgtctaagctggcttcctctcttatatgacaaaggtatctatatttgatacactaacctccttttctttggctgtatacccagcacccagacaactggatcatctgcagttttgcctttagatttgtgagaccctctctcctgttctccacagtgtcagaactaatctacatctctcctactgtgtgtgcacgttccattttgtttccatgatgaagggtggatgttactggataatgagtttctggtggtttgaattgggtattaccactggaagcttgggattagggacagtcccaagcagcttccccgtgaccatcacatggtcacaaggctcacacggatgacctgagcatcaacacagacgaagtcccaggcatgcttcaggaaggggcttctttcccagtgccagatgggttttgtgttaggagtcattttggtctggtattaaagaaggctatgaccacaggggaagagccctgacgtcacatcctgtggcagatatttctccttccttcctccctcatgttgcttctggatggttataagtttgacgagtgatctggaaacatcaaaggggaaatagactggaacggtggcctgggggggattgcctagtgggtaaagcacctgatacacaagtgtgagggccagaatctaaatccttaaagcagaggttctcaacctgtgggttacaatggggactcaatgacccatccattcacagggatcacttaagaccaccagaaagcacaggtatttacactgcagttcataacagtggcaaaattacagtcatgaagtagcaatgaaacgatcttatgtttgggcctcaccacatgaggaactgtattaaagggtctcagggttacacagccttagcacctacctaaaccgtggacatggtggaacatctgtaacctggtgctcccacagtgagctgggaggcggagatgggagagtcccggaaagcttgtaagctggctaccgctggcctaatgtcagcaaacaagatcttgtttcagatgaagaaggagctgaggaccagggttatcttctgacctgcacacatgttccacaacttgcacacggtgctgtgtgtgcatgcttgtatggacacacacacactccaaacaaacacactttttagaacctcttcctggatggcagtggggaaaatgttgtaaaatgtgaaattgtcagagaataaaaatacacaaaggaagagaagggggaagggannnnnnnnnnnnnnnnnnnnnnnnnnnnnnnnnnnnnnnnnnnnnnnnnnnnnnnnnnnnnnnnnnnnnnnnnnnnnnnnnnnnnnnnnnnnnnnnnnnnnnnnnnggtttcatcttgctggactagatgatctccaaggaacaaggcattgaccagctgtagagacaggagtcatcaagttagtgaaggttctagggcctctgtgatcatttgggatcatcttcaccatgaccccaaggacaggcaaccagctctctgcagtgactatattcagagttgtctgtcctgccaccaacactagatgacaattgccatccatatcctcttgtgaatgctgctacctgactgtggtgggttgctagaccatggcctttcactggaaaactaacacagcaagctgtcccatcccctttgcaacgcaggccagccccagctcacagtggcatgcgagcttttatagatcgtcaatatttaaacaccttgctgggacccagggacctctggatctcagctgtcatctatttcaggcctcattacacaaaccattaaacactgtatcttctcattttctccactgaagctccctggcaaggccttctccgggcagagcgcctttttatgcagagtcctgcccgcctggcatccagggggacagagacacttaggtgtcccatggcccaaatggtctgttcagcctaatgtgtccctacccagccacatccctgcctgcccccatcaacaccatgttccctcatctgtccctatccctgtcttcacccctgaagactttgctgaggagcccatggctgctccgcccagcagcagctaatggcagtagcatcaggctaaatcacagagcctctcattccagagaaggtgattcctgagtatcgctggaggacatgcccatcaagctctggccaaccagctggttcatttctctaaattttgagcgagtctcccctggaattgtgtcgcaaaaggcatctggaaagcagctatgcggtgggcaggcttgaatgatttattcacgaaaattattccaaggcattttgctgtgtagctctcagagcctaatttacatatttacacaatacactggaatggcactaaaggcactataaatatactttcctctccaaagcggccatgaaatatatatttaggacgcacccaaggcgggcagacattgtggtgttgttctcacagatgatgccttagcctgcaagcaaggggcggggcctgtacaccctcagccctcctgggtgcaccccaagccctttcccattcattgtggttttcagttcttggtggggtgagttttaactgaacaaagaagaaaatcaatagttcccagctgggcatggtggccgacctgtcttcccagcattccagaggataaggcaggaggatggtgaagtctaggccagcctaggctaccttgataggcagacccagtttcagaaataaactagtaccgagctagggagatgggctcagttgataaagtgcttgccattgcaagcatgaggcctggagtttgattcctacaacccgtgctcaataaaatgaaataaagtaaaataaaataagtcagcaagccactgagagacactgcctctaaaaccaagggaacagtacctgagaaatgacatctgcacaggcacacatgtacatacatgcatgtgcacacacgatagatagatagatagatagatagatagatagatagatagatgatagatagataggtaaatagatggatgatagatagatagatagatagatagatagatagatagatagatgatagatctcagctgaggctctgcattatgtcaacacacatacacacacactctttcaccctcctctccacccccatcccaaatgcctgggtgtcctcctttcctgtatcagtctccttcactggccctcgctgccttgagacacacacccgagtgctgtctgctaccttgggcaaggaccagacaaaaggcatttttgttagcagctgtatttagcctgttgtttaagcctcagctcctagcttgaccattcatacagagagaaaaggcaacacttaagaaataagcaactgccaggcatccacccgctcagcactgcaggccgccagtcgggctgttggctgcgtgacttagtggtgagtgacagtttccattcagcatggagaccctgcttaattggccgtgaaatcaaacttttgtattggcacgccgtctgccctgatacctacagcgcttatgcctgggcgttggagggatacatccagcaaaggccccttggtcatgctgcactgggctctgtctcggttcagagaggattgggtagcctgtgaacaaatgcatctcctacactggggctagggagatgcaggcctggagagctagagctgatccactccgtcctctagaaacaagcatcgcctttggcagcagctgggtttgcaccagaagagcccctctgagtttaagacctccgttcttcctctctaagggtgagcagcacagcggaggaggaagatcacagagtctgtgctctctaagggacagccatgcagagaactgaactccgcagttccactctcctttgtgagaccttaggtctgtggtgacagcgacgcttccttaggaacagccgcagtttctatcccggtgcttccttgctgcttccttaagacctccaggcggactttccctgacagtacgctaagaaacaagattggcaatccaggaaccggttaccagtgatctatcatgggggagtccatcagggcagagtatccaggcgtcggtccccctgaggatgcatccagagatcactcattttagatgcaaatatcaaacacctggggatcagtctctcaggggtcgatttatcctaagaatcggtcaccaggagccaagtcgcccatggttatcttgtgatgttatcagagggttaggcatctggggaccagacaagaggtcaatctgacatgtgttaactgtcagggatcatctaagagacccaccacctaggggatctgtcacccagagaccagtcactcgggggactgactgagaagtcacccaggaaacaagtcagtcactcaggggaccagctatacaataggcctgtcacccaggggacccatcacccagggaaccagtcacccagggaaccctgtcacctgggaattcatcctcacagatccatcctctagggttagccggtagagacctggccttgtgtgtgagatgtgtgatgtgtggtgactggtgggtcacctgcattcactgcccagggttctcttgtgataaacacagccatgctgtcctctcttgttctgactgagatggaaggccaggcactggggatcttcccagtataaggagaatcagtcgcacaaatctcattattgttaatagttctgtaatgttatttttctcacaaatttgtggaggtattttctccatcactgatttattgagatatttagcagcataataaaaatgagaaaaacaactcgcagttgggaaacagtggctgctccctcagctgccaagggttttttttttgttttttgttttttttttttaacccactggtgatcgctgtgtaaatattggtatggataaatagcgcactgaattataatccgagtatgatatgctaatttttgaaggcagaattaagcaaaataaaaaatgcaaacattttctgctgataattcggagggaaattatcttggcgccacaccaccctcccctgctttctgagtgtaagtggatggctgaataaatggctcagtgttgagatcctatatcgatattttaaaatgtttctataaaatacgcacagagttcctggagctatgacagagctcttaaagtcaaatatagtctttgggtggcgacagacgtgaaggtgatggcgtccatccctagtgactgcagagcgttaaggaagcatggatgcagggcacactgagagagctccccataaacacgtgtcccgtaagctgtcccttcctggaatgtgggttggagttgggcagggcatgttcttgccttctctctccctcctgtccatgaactgcacatagcctatgagaacagagactctcctgaccagcggaagggcagaagagtgtcctaccagagtgggccctgaatatttgtaggtgaaccagggaccatcagaggcgttccagggctctgcaggccatgtgtattaaatgttccgtcactctagagtgttcttaagcaaaattcacctaagaaatacaaaccagggctggagaggtggctcagtggttaagattgctacttacagaggatccgaatttggctcccagcatctatttcaggcttgcaactggcaataactccactccaggggatcccacaccctcttctggatgccaaaggcacctgcacatacagacattcactcacagagacactcatataaatccaaataaatcttattaaaacatgcatacacacacatactagcatccattctgtgcatataagccttgttaggaagcaagaagagagacacctatgctatggtttgctgttgtgacattgccacccccgacaggtctcttgatgaacaaccaacgatgttaatatgtaggagtaaatctcgaggctctactctctgctgacgcctttaaaaagatcagcttcactcgttcattaacctgtgactatcagggcttcgccagggcaaagtctaaaccctgagcaaacacagacgcacacgctggcaagtctcctcctgtttgccattgggctaatccattcaagtgcatcttctgcgaggcagtgtggggaggctccgctctccatcaccctgggccgtaaaaacagcaagtgcgtgcacatgtatattcagtgggcttttcctccccagatcacctgcttcttcaagccccacgtacgtttgcctgtaagaggaaattgaactggggaaggattactacatcataggaacagtttagactctgcgcccaccttttagcaacagcctccccggggaataatttatattttatttgcaatccctcatgttgcgctgactgcgtgtgaagctgtgtgctaagcactttagaaataaaaacatactgaatcctcaaggaaggcctacactgtatatacctttgtcatcgccatttgacagacgaggcacagagaagttgagtgctctgcctaaggtcacacaaccaatgacaaggccacaaaggttg

SEQ ID NO: 757 - DNA, 4578 bp, Mus musculus
gagatactggtacccacgaggccatggccccaatcatcgtggttgccccaggcaacagaagtgtggtagcagggtccagtgagaccaccttggagtgcatagccaatgccaggcccgtggaggagctgagtgtgcactggaagagaaacggagttcgactcacaagtggactacacagctacgggaggcgccttaccatcaccaatccgacatcagcagacaccgggatgtacgtgtgcgaggcgacactccgggggagcacatttgagccagccagggccagagccttcctttccatcatagagccaccatatttcactgctgagccagagagtcggattttaggggaagtggaagaaactatggacatcccatgtcgagccatgggggttcctcttcccactctccagtggtacaaagatgctgttcccctcagcaaactccagaaccctaggtataaagttctccccagcggaggcctccacattcagaagttgagtccagaagactctggaatcttccagtgctttgccagtaacgaaggaggagaggtccagactcacacctacctggatgtgaccaatattgctcctgccttcacccagcgtccagtggacaccacggttactgacgggatgacggctgtcctgaggtggaaccacattctggccagtggctctgtccggattcctaggttcatgctgctggaatctggggggctgagaatagcccccgtcttcatccaggatgctggcaactacacctgctatgcagccaacacggaggcttctgtgaacgcctccgccatgctcaccgtgtggaatcgaacgtccatcgttcaccctccagaagaccgcgtggtgattaaggggacgacggccaccctgtgctgcggagctacccacgaccctcggacctctctccgctacgtttggaaaaaggacaacgtggtcatcacagcgtctagcagctccagaattgtggtggaaaaggatgggtcgcttgtcattagccagacgtggtcaggggacattggtgactacacctgtgaaatcatatccgagggagggagtgactcccggacggcacggctggaagtgattgagctgcctcacccacctcaaaacctgctggccagcttgagtccagcacgcagccactcggtgacactatcttgggttcggccctttgatggaaacagcccggtcctttactacattgtgcaagtatctgaaaacaaaccaccgagtgctcccccaaaaaacattgtggccagtgggagaaccaaccagtccatcatggtacagtggcagccaccacccgaaacagagcacaatggggtgcttcggggctacatcctcaggcaagtacctaggacaggccttcagggtgtcccattaactgttcaggtcaagtaccgcctggctggcctgcctggggaacaccagcagaggaacatcagcagcccagaggtgaactactgcctggtcaccgacctcatcatctggacccagtatgagatccaggtggctgcctacaacggggcaggcctgggtgtcttcagcagggcagtgaccgagtacaccttacaaggagtgcccactgcacctccccagaacgtgcaggcagaggctgtgaattccaccactgtgcacttcctgtggaacccgccaccccagcagttcatcaacggcatcaaccagggatacaagctcctagcatggccggcagatgctcctgagactgtcactgtagtcactattgctcctgacttccatggaatccatcatgggtacataacaaacttgaagaagttcactgcctacttcacatccgtcctgtgttttaccaccccgggggatgggcctccaagttcacctcagctcgtgtggacccatgaggacaagccgggagctgtggggcacctgagcttcacggagattttggacacctctctcaaggtcagctggcaggagcccctggagagaaacggcatcattatgggctatcagatttcctgggaggtgtatgggaggaatgactctcgactcacgcacaccctcaacagcacgacgcacgagtataagatccaaggactgtcatcactcaccacctataccatcgatgtggctgccttgaccgccgcaggcgtgggcgtgaccacatcatccaccatctcttcaggtgtacccccagatcttcctggcgctccatccaatctggtcatttccaacatcagccctcgctcagccacactccagttccgacctggctatgatgggaagacggccatctgcaggtggattgtggaggggcaggttggtgccatcggggacgaggaggagtgggttaccctctatgaggaggagaatgagcccgatgcccagatgttggagataccaaacctcacaccctacacacactacaggtttcgaatgaggcaagtgaacatcgtgggtcccagccccttcagccagtcatccagggtcatccagaccctacaggccccacctgatgtggctccaaccagcctcactgtccgaacagccagtgagaccagcctgaggctacgctgggtgcctctgcctgattcccagtacaatgggaaccctgagtctgtgggctacagggtgaagtattggcgttctgaccaaccatcgtcagctctggcccaagttgtcagtgaccgtctggagagggagctgaccatcgaggaactggaggagtggacagagtacgagttgcggatgcaggccttcaacgccattggggctgggccctggagtgagctggtgcggggccgcacgcgggagtcagttccttcagcagctcctgaaaatgtgtctgcagaggctgtcagctccacccagatcctactgacttgggcttcagttcctgagcaggaccagaatgggctcatcctaggctacaaggttctatactgtgccaaagacctggacccagagcccagaagccacgtggtacgagggaaccacacgcagtctgcgctgctggctggcctgcgaaagttcgtggtctatgagctccaagtgctggcgttcacacggatcgggaatggggtccccagctcacctctcatcctggagcgcaccaaagatgacaccccaggtccccccgtgcggctggtgttccccgaagtaagacttactgcagtgcggattgtgtggcagcccccagaggagcccaatggtgtgattctggggtaccagatcgcctaccgcctggccagcggtagtcctcacaccttcaccactgttgaggtgggtgccacggtgcggcaattcacagccacagagctggccccggagtctgcctacatcttcagactgtctgctaagacgagacagggttggggtgagcccctggaggccacagttatcactactgagaagagagagaggccagcgccccccagagagctcctggtaccccaggctgaagtgacagctcgtagcctcaggctccagtgggtccctggcagtgacggggcctctccgatccggtacttcacggtgcaggtgcgagagctgccaggtggagagtggcagacctactcctcatctatcagtcatgaggccacagcctgtgctgttgagaggctgaggcctttcacctcctacaagctgcgcctgaaggccaccaatgacattggggacagtgacttcagtgcagaaacagaggctgtgaccactttgcaagatgttccaggagagccaccagggtctgtctcagccacaccgcacaccacgtcctccgttctgatccagtggcagcctccccgggatgagagcctgaacggtcttctgcaaggctacaggatctactaccgtgagctggagtctgagacaggcatgagccctgagcccaagacactcaagagcccctctgccttacgtgctgaactcaccgatctgaagaagtaccggcgctatgaagtcatcatgactgcttataacatcattggtgagagcccagccagtgtaccagtggaagtcttcgttggtgaggctgccccagcgatggccccacagaatgtccaggtgaccccactcacggccagccagctggaggtttactactgggaggcagacagtcgcaatgagacagagaaaatgaaggtcctcttcctccccgagcctgtggtgaagatcaaggatctcaccagccacacaaagtacctgatcagcatctcagccttcaatgctgctggtgatgggcccaagagtgacccgtgccaaggacgcacacatcaggcggctccagggccccccagcttcttggcattctcagaaataacttctaccacactcaacgtatcctggggagagccatcagctgccaacggcatcctacagggctatcgagtggtgtatgagcccttagcaccagtgcaaggcgtgagcaaggtggtgaccgtggacgtgaaaggcaactggcaacgttggctgaaggtgcgggacctcaccaagggagtgacctacttcttccgtgtccaggcgcggaccatcgcctacgggccggagctccaagccaatgtcactgcagggccagccgagg

SEQ ID NO: 758 - protein, 1518 aa, Mus musculus
  VARIANT (1)...(1518): Xaa = Any Amino Acid
DTGTHEAMAPIIVVAPGNRSVVAGSSETTLECIANARPVEELSVHWKRNGVRLTSGLHSYGRRLTITNPTSADTGMYVCEATLRGSTFEPARARAFLSIIEPPYFTAEPESRILGEVEETMDIPCRAMGVPLPTLQWYKDAVPLSKLQNPRYKVLPSGGLHIQKLSPEDSGIFQCFNEGGEVQTHTYLDVTNIAPAFTQRPVDTTVTDGMTAVLRWNHILASGSVRIPRFMLLESGGLRIAPVFIQDAGNYTCYAANTEASVNASAMLTVWNRTSIVHPPEDRVVIKGTTATLCCGATHDPRTSLRYVWKKDNVVITASSSSRIVVEKDGSLVISQTWSGDIGDYTCEIISEGGSDSRTARLEVIELPHPPQNLLASLSPARSHSVTLSWVRPFDGNSPVLYYIVQVSENKPPSAPPKNIVASGRTNQSIMVQWQPPPETEHNGVLRGYILRQVPRTGLQGVPLTVQVKYRLAGLPGEHQQRNISSPEVNYCLVTDLIIWTQYEIQVAAYNGAGLGVFSRAVTEYTLQGVPTAPPQNVQAEAVNSTTVHFLWNPPPQQFINGINQGYKLLAWPADAPETVTVVTIAPDFHGIHHGYITNLKKFTAYFTSVLCFTTPGDGPPSSPQLVWTHEDKPGAVGHLSFTEILDTSLKVSWQEPLERNGIIMGYQISWEVYGRNDSRLTHTLNSTTHEYKIQGLSSLTTYTIDVAALTAAGVGVTTSSTISSGVPPDLPGAPSNLVISNISPRSATLQFRPGYDGKTAICRWIVEGQVGAIGDEEEWVTLYEEENEPDAQMLEIPNLTPYTHYRFRMRQVNIVGPSPFSQSSRVIQTLQAPPDVAPTSLTVRTASETSLRLRWVPLPDSQYNGNPESVGYRVKYWRSDQPSSAQVVSDRLERELTIEELEEWTEYELRMQAFNAIGAGPWSELVRGRTRESVPSAAPENVSAEAVSSTQILLTWASVPEQDQNGLILGYKVLYCAKDLDPEPRSHVVRGNHTQSALLAGLRKFVVYELQVLAFTRIGNGVPSSPLIRTKDDTPGPPVRLVFPEVRLTAVRIVWQPPEEPNGVILGYQIAYRLASGSPHTFTTVEVGATVRQFTATELAPESAYIFRLSAKTRQGWGEPLEATVITTEKRERPAPPRELLVPQAEVTARSLRLQWVPGSDGDIRYFTVQVRELPGGEWQTYSSSISHEATACAVERLRPFTSYKLRLKATNDIGDSDFSAETEAVTTLQDVPGEPPGSVSATPHTTSSVLIQWQPPRDESLNGLLQGYRIYYRELESETGMSPEPKTLKSPSALRAELTDLKKYRRYEVIMTAYNIIGESPASVPVEVFVGEAAPAMAPQNVQVTPLTASQLEVYYWEADSRNETEKMKVLFLPEPVVKIKDLTSHTKYLISISAFNAAGDGPKSDPCQGRTHQAAPGPPSFLAFSEITSTTLNVSWGEPSAANGILQGYRVVYEPLAPVQGVSKVVTVDVKGNWQRWLKVRDLTKGVTYFFRVQARTIAYGPELQANVTAGPAEX

SEQ ID NO: 759 - DNA, 120644 bp, Homo sapiens
tgaagccctgagtgtgagcgctcacagaggatgaggtgggactgggctctaggtacaaaaggtactacctccaggtgagctgcttgctgtctctgggaactggctcaccctgggagggccatctctccagggccagccaggcccaggtgtgccaggtccagtggaagtggtggctaatgcaccgtgggcagggccaagcaggcacagagtggggcgtgtgtgagcgggatgtgatgggagatggcccaaggggagccgcagctggtgggaaaggccatgcttgggggctggcttgtttttatctaaaagcacccctaagaaaccgtggctgctggtcaccgagctcgctggcatgtgccggagtgtccggggctgacctcgtcccactgggggctcttgacagccctttagggtgaccactgtggtcctcgctatgtggacaggaagtctcaggagctcagtgtctctcgaacgtaggcccagccaggcctcatgccccagagattttggccgaggagccactgctgctctcctcacgccccttcctgggcaacggagcagaagtcctcaccagcgtttcaggaatttagaaatattagcagggaatcacccaacatgtggcacagggagtgtcaacgtccctgtttccccttgagagggatcagatctgatgggagggagggacagatgcggatggggaggttgcaggactcagctcagacacggccctgggctcctagggcaggggccatggggggcagacatggcctccaggagaagggctttatgaaggagctggttccttcagggcatggggttgagcgggaaggctgtttcgggggacacacttgggagatgtgaacaaactggccagaatgcagagagcacagggggagctaaggcaggcaccaggcgctgtggactgagcgtgcccccaattcctgtgctgaaatcctcacccccaaggcgagggtgtcagcaggcctttaggaggggatggggtcatggggtggagccctcaccaatgcgatgagtgcccctctccttccaccacgtgaggacacaggggcatttggccatccccagcctggaagggagtcctcaccaggacccacccaggctgaccccctggtcccttcagtcccagcgctgtgaggaaatgaactcccattgcttgtaaaccacccagtctgtggagtgtcatcacagtcgcctagtggggaaggtggtgtaggagggcaccaggcacccctgggcctggagagggaggctggaccgctcggcacagcaagagccgtgaattggagtcgggtgagatggatgagctgggggcctgtgggttaacaaggaccccagactcatctgcccctccttccctgtggctgtgagccccaaggtccacaacaccctgaggcctgccccaggctgaaccctgcagggtgcgtgacgggggaagggaggcctatgcggaggtgcacacaggggtctcctttaggccagtgctctccgcactggttgccagagaggccgccttgcctgggccccgaaaaccaacagctgggcagccctgaccctttggtttgtttgttttaaggtagcaaggacacttgcatttttttttttttttttgagacggagtctcgctctgtcacccaggctggagtgcagtggtgcgatctcggcaagctccgcctcccgggttcacaccattctcctgcctcagcctcctgaatagctgggactacaggtgcccgccaccacaccacgcccggctaattttttgtgtttttagtagagacgggagtttcaccgtgttagccaggatggtctcgatctcctgacctcatgatccacccgccttggcctcccaaagtgctgggattacaggcgtgagccaccgcacccggcggaaaaatttgcattttttaaaactcaccgatctgtcaaaatagttcaagcaagaggttgggagcttctacatcagggtcctaccactgaaatcaagcaaatgtaagagaggctgtggaggagaccccaccatgtgcagcaggggaggggtgacagaaggagcactgaccctcgatgacagaggacgatggtgtcgtgaccagaaatagagccttccacaggcggagcccgtcttgggaggaagatcgcggttctggggtgaggctgtcacatgtgagctgctggaccccagaagcgtctgcctgtggtcggtaggaaggaggtcccgcacccaggtctctgtctccttgtggagggacaggaagggccctaggaaggaagccatgcaagagagaagaaagaggaggcaaggacacactcaggagggtcagagaaagggccagatggggagtggagggagatcgagagagccagcaccccaggaacccaagcatggagctcaggatcagggaacaaagcccatcactccacagcccttctgcctctgaagatccaaagaatattaaacaggaaagacaaaacaaacgacaacccggaaagacagaagtccccagggaagggctgggaatctagagctgggctgattcaaagcctgaagcttccttgggagtgaagataaacgcagcacagcgtcgagtcccctgccggcttatgaggtgtgcaaactctgcgatttgtttgagggaactggcctctgggccttcctggtttcctgtgcctttaccagaagcccccatctgtccctccctctgcaggggccctccagccacctcctctcaggaggtttcatttggctgtggtgggcacggggaggagccgtcagaagcaggggtactcagtgtctgtggaagttgctagacgtgcaagttttcctgctgacaccagagtttcagccaggcagggtgcgcttggcttggcagctttccatggaaggggttctggagcatctttttctcctcctcttagctctggatggaggggggccacctcctcacgtccctcctcccttccccacacgcagctgcaccttgtctgcttcctctccatgtgcagaattacctttgggatgaggttaatgactctcctctgagcagccattgaccctggcctccggagtgctgagctcaccatggccaccagagcctcccagcaggggtgttcctggtcctgccctgcccaccagtttccaccagtttttccagaggccggatctcatgtgcacaaacagaccaagcctcctggcccactggcgccaaaccccggccagacctgggagtgggcaagctggggctgcgtggcgggcggcagcatccccgtgggtataacagacagacagctcccctaatgggcctgaaggaccgcccctaccgggtggcatttgaaatagatgccatttctgcctttgtccgaaatatcataaagtactgtttattagccttaaaaaaagttaaaaaaaaaaaaaaaaaaaaaagccgttcaaaatcccggcttccccacagagcttttttttttggagacagagtctcactctgtcacccaggctggagtgtagtggtgcgatctcggctcactgcaagctccgcctgccgggctcacgccattctcctgcctcagcctccagagtagctgggactacaggcgcccgccaccacgtccagagaattttttgtatttttagtggagactgggtttcaccatgttagccaggatggtctcaatctcctgaccttgtgatccaccttcttcggcctcccaaagtgctgggattacaggcgtgagccaccgcgcccggccccccacagagctttgatttgttttatctttaaagaattctgcctccctctacatcagcacattgttagtgagcacccagttgcttctagaacattctttcttggccttgaaatctaactagagagccagaggagcccagccagggttaaagaactcctgtctctcacgaaaaaagagtcctggtctctccagacaaaaatgtaaaccttttattatagaaatttcagtttctcccctagaggtcgctaagtgtagttacatttttggtgatcatctgttttggagctccgtgtaaagcaacccattttcagtactgatttttaaatcattcgcatgttcatttgtaaattcgttaatgcattaaacaccaagttgaggctggaccctgggagagatgctggaggtgcagggatgcgtgagaccctgaccttgcctcagggcaagtccacaagcagccagaagtgatgacacatgtggtgagaggactcagcagccgaggaggagtcagtgccgtgggggtggtgcgctccagcagggcttgccacactttctgtaaaggtcccgatagtgaatacttgaggctttccaggtcagacgctctcagttccagctccgcagttcggctgcaaaagcatgaaagtggccagcagccgcacaaaccagtgacagtggctgtgttccaataaaactttatttacaaaaacaggaagtgggccagattcggcccctgggccggagtttgctgactgcagtactagagccctgcttgtttgtgtttgagacggggtctccctctgtggcccatgctggagtgcagttgcataatcaccactcactgcagcctagaccctcagagctcaagcgatcctcctgcctcagcctccagagtagctgggactacaggcatgcaccaccacacctagctagattttgtatgttttatagagaatggggtctcaccacgttgcccaggctggtctcgaagtcctggactcaagcaaacctcccgctttggcctcctacagtgctgggattataggcgtgagccactgaacctggcctagagcctgctttaataaacctgctaggggccatcacgttaaagaaggtaattgtgtttgacttactgtttgttgatttggcccagactctgtgaagttggatgctacctcatagaagattgtaagttgcaaagccagaggtcacggttatattgctctcatagctggttttatttctaactttttgatcttattgagcattctttctttcattcactctacatactttgacatatattcccctccgaaccagttttaccatcttactagttcctcattaatgagtgaaataaatctttgacacacactatatatttgtatgagaatttgtatgcatgtatgtatttatttatttatttttgaggcagggtctcactctgtcatccaggctggagtgcagtggtgtgatcatagctactgcagccttgacatcctgggcgctaatgatccccctgcatcagcctcctgagtagctggaactatgggctgtgccaccatgcctggctaattttttttttaattattttgtagagatggggtctccctctgttgcccaggctgattttgaactcctgggctcaagagatcctcctgccatgtctcccaggagctgtgtttttatttatttatttattcttttgagatgaagtcgcactctgtcaccctggctggtgtggagaggcacaatctcagctcacagcaacctccacctcccaagttcaagcaattctcctgcctcagcctcccaagtagctgggattacaggcatgtgccaccatgcccagctaatttttgtatttttagcagagacggggtttcaccatgttagccaggctgatcttgaactcctgacctccggtgatccacttgccttggtctcccaaagtgctgggattacaggtgtgagccaccgcgcctggccaggagttatattttttgttttttgtttgttcgtttgtttgttttagatggaccttcactctgtcgccaggctggagtgcagtggcatgatctcagctcactgcatcctccacccccctggttcaagcgattctcctgcctcagcctcgtgagtagctgggactacaggcacgtgccaccacacccagccaatttttgtatttttagtagagatggggtttcaccatgttggccaggctggtcttgatctcttgacctcgtgatccacccacctcagcctcccaaagtgctgggattacaggcgtgagccaccacgcctggcctgggagttgtgtttttaaatgaatgctttgacagtgatctgcactgtgctgggggtactctgaagagggtataggagtacagaattaggacatagattctggcagcctggcaggggcagtgagaggctaagagggatgctgttcagaggcttccgaaaggcccggatgctctccagattccaaaggagtcagccagttgcagagaggaggggtggaaggagcagacacactctgagagggggaagagtggtgcagggggacaggtgttggagactgcgtgatgcctccaggtaatgacaaaccgcggctgcaggaggaagtgcaggcagagcctaatggagccatgtggcacctgcctgggttccccaatcatttggcacctgttccaatcgacatctttcaaaaagggagaccaggcactgggcgggaagggcagggtagtttgaccttggctgccaccttcagtggtccacccttttcccaatccattgatcctggccctgaaactgttttatgctcagcaaaacaacagccctgtagataaccagacactcgctgctcagaaggcaggtgagggggtcatctcatggagaatggccacagggcctagcaatggctccctcctcaggctctcctggtgggaaaggatgaagtgaagtggagatcagccgccccactgtcccccgtttcttttttttctttcttttttttttttttgagacggagcctcattctgtcacccagcctggagtgcagtggcatgatctcagctcactgtaagctctgcctcctgggttcatgccattctcctgcctcagcctcccaagtagctgggtctacaggcacccaccaccacgccttttttgtatttttaggaaagacagggtttcaccatgttggccaggatggtctcaatctcctgaccttgtgatccacccacctcgacctcccaaagtgctgggattacaggcgtgagccaccgcgcccggccagcccccgtttgtgaccgtgcagtggtttcccagcatctctgcagagggagccgcacgcccggcgttctcagagaaacccgatgagcctggctgcctcttgctgtgctttcccccactctcctgctctctcaacgcggcgcgtgcctttctctcccgggcagcctcccgggccttactggttctctttcgttcctcttggtcgtgggggtggaacagccctgaatcccagagctactgccctgaccaccgctgaccccgcagcagcccctgtggctgagagcctgccctgagtgcccagtgcctgaacaagatgagggagcccacagggtcaggaagcccccaggcctcaggtgaatgcttctggggccaggaaagcagccagacagactgaatccatacatgccgagcatccaggccagaggagggcagggagctctaggcagagcccccgcccaggaccccagcgttcctcagtcttgtttatttctccctcaggcagccgaatacacacatccagggtggggagggtggggagggtggggagggtggggagggtggggagggtggggctgcaggggccaaccagaggaaggagacctggagtcgcttagcaaaggtgaatgagcgtccgcagtgcagcttggggtcttgagagtaagttgaacccgccaggcgtctgtttccccctcacacatgcacagaccaggcaaggacccggaaggcaggaggctgccgggaaaagcgcccaccggtcacttggcaccgtgagctacgcacgtgagccacgtgcgccctgactgctggctctttccttagtgcttatacgtgattgataaaaggtgctaaattgacggcctgaaatggaagtcatccctttttcttcctttcttcttcttttttttttaaacaaacaaaacgtattctccatgaaatcgcccagtgctttggtttaacacccagaggactggtttcactaagaggagcccacctaagtcaccgaggactctgaaaccgctaaaccatgccacagggccagcattcaacacggaggcactttgcacccagtaaaatccaactgaaaaaatgtggggcttggtcctccgcactccccagtatctggtcccagcccgcctacgacccccatctcctcccctgagacattgcccaggcagccgggggcctcccacggaagcctgagcagctcgtcttgcttgcccttccctctgtgctgtggtgcgtgttctccattacctggaggcctgtaaggtgtcgtgagctgtgccgatgtgtgacaaacatttggtgaccttgaatgaatcactctttttctgggcctcagcttctttcagcgtaacataggctggaataatatcctccggcttcctagcttatgggtgggcccatttatgcatcagctgcatagataaatatcgcacggctcctctccactagacactgtgccggggccagagctttcaagccaacctgagtgagctcctctgagatccccggatcgtgaagttcattctctttttgcccatcaggattggatggttccagtctcagcattgtgctcctgggtcctttccctcttcacagacgcgatggaggaaggcagctgccatgggccctgatgggggatagggaggcctcagtcctgtctgactcaagagctagtccaaccccaggttcgcctagacccttcccttctccaagatgagtgttctgtggaaccttaatctatccacataactcttgttttctgtgtctctgaagtgaggatttgagggtttcgatggctaccccagtgctgagaactggctcactttggctgaagtgaggatatgagggttttgatgtctaccccagtgctgagaactggctcactttggtgccaggggacttgccccctttgcctctggctgtgcaagctgcacagtcttttcctaattacaccaccctgtggttttgccgacttccggggtattcattatctacgctgacctccagctcgttctctaccaaatattttggccggtcattctacatttcattttattgtttctttttttcgttgaggtgaaattcacctcacataaaattaaccattttaaagaataccattcacaacttagtagattcccagtgctgtgcaaccaccacatctgtctagttccaaaacatttttatcatgccacaaagagacctcatacccaatagcagtcacttcccatcccctcctctccccatcccctggcaaccaccaacctgcgttctgtctcaatggatggaaagatcctggacatttcgtaaactggaatcgtgcggtgcatggaccttgggtcaggcttgcttagctttccatcagtcatgttttgagatttgtccatgtggtagcaggtgtgggtgctttgttcctttctatggctgaatcctgttccatggtgcagagtccttttgtttatccactcagtgctgggcgtttgccttgttcacggctttgactgtcgtgactagtgcactaggagcatgtgcctgcaggtatctgttaagacacctgttgtctgttctcttgggtcagtggctgggggcggagttgctggcttatgcggtgactgtgtgtagcttttggaggagccactgaccatgtggatgttttcagctgaaagcgttgagagttttgcgctttgcctttcgagttctctaggaagcaagccaccagcatgcctgcttacacagtctcctctgcatccgtgtcgccagtttaccaaggtcattttgaattctcctgccaccctcccaagacttagccacccaccaccttggtttcctctgcacacttagtgagcacgtttcctatcctgtcatttaagccacttacgaagtgttaaatgcaccaggccccaggccaatcccactccagcagccagtttgtcctgacatgctctccatgcttgcagccggccttctctgtgtcccttgggtcccccagagccacacggccacacgaaaccagagtttgcttgtgatggggctgcagagatctccaaagatgagctccagggctctcctggtgggcacaaggccgtggctgtctctcccgtggctccctagctggcgcagcttgtgtggcaccatcaagggggagagagggacgtggtcagcttggggcagtggcagtagaagcggcactggcactcgggtttcttaagagcacaaggatgagtgagaggtggggctcggggtcagattaggggaaatgaaaatgctactgagcagggagatggtgtggagctcccagacagggagtaaaattagcacgagacagaccatggggcaggagcaaagactcgggagaggaagaagctggggaacttggagggcaccctgcaggcatcgccagcagacccggaaaaggcaagtctctgttgaagggagtggctcttccctcgtcaacactgccaggaggcagtttctttaaatcttaaggggactgggcctgccgatctggcttccagggcagaagactcatccttccctgcctaaggaccttccttatgccgtgggccagcaatggtgtctgtttggtgtgtgtttggggcagaaagggttggggtcgaagctggacccccagcctgtgcccacagctctgtcactgcttaccatggtcctggccaagtcttcctctccaggctttctctgagccctcacttgtcaaacaggaggaaggatgagatggtatggaaggtcccctccatcactgatggcctccaagccctcagaggtttgttcccaggggtttcactgtttgggtccagtccttctgtggcccagttcttgactgtgagcttttgactaaaactcacccagacttgatggtgggcatagcaagagcctgtatctccaaggcacaagagggggttgtgcaggactcaacttgtcccaggtgtggggacgccttgcagccctgcccagctcaccaggtaccagcaggtgcacatggtctacatggcagcctcagtccctaaggcatgtccagcccatctcagtgtctccctctgcacaggtgggagctatcggcgacgaggaggagtgggtcaccctctatgaagaggagaatgagcctgatgcccagatgctggagatcccaaacctcacaccctacactcactacaggtgagaacagcagtgataagctgttacaggaggaaacactggcagcccaggcaggtgccttctgttggcaatagtaaaacccagtcgtacgtatgcaaatcagatgtttcctagtggcaataacagtacctaaaagccttaaggagcaggcgggatgcatagcttggtgttattccaagggagatgataggcagatgttagactcatgaggctccttctatcagtaccagctggcaaaacaccccatagaaatggcccactgttattatattaggctgaataaccaagaaccacaggcagcagagatgtggcactttaccaaactccacaacctgttgggactattaacgtgccgtgtgcaaacaaagcagatgtcctaggaagatccttctgctccccttcccaagcagggcccaggagctgctagtctcacttatcaagcaattaacatgccatttaacctttagcttcttgaaccccgaaactgatccgggcagtaaatccttggctttaacaaagggtagggtgattatgagctgttagtactgtgatcacttcccgtaaggcctttgaaggagatggaatttccagttatcaccagatgttgagtttgataatgtcattgttctgccaggatggaacatttcatacgattggagaatgaaagaataggaattagtaattcagggactaaaaggtgaaattacatctttatgaagaatttttctttccggcacaaaaccaaagttagagttaaaaaaaaaaaacaatgagagatgctatttagcttctattcattttaacatccttcaggagcttagaacagacaaatcaggacacaatacactgggttttaaagaaaaacatttagcttaaaatgagctgttgggattcaagacttaccatgtgaaattaactgaagctatatagttatttcaaagaacagaaactgtaagtagagatcagtgtccctgtctgaaactcaggtacatttggggaaacctctatagtaaatgtatatgtgcatacttgggatatttttctagtatgtaaattgaattcaaataattgtttatgtatgtgtaaagaagagacagaactgaaagcattcctgtagattttagagaacattgaactccaccttcattttatagttaaggaaacggagatcatctgatttgctgtaagtctcacagttactcactggatggaatcacagagtgtggtgtgagcggatagaggcctcagttacctgacaaagtttattctgccaaggttgaggatgcacccgtgacccagcatcaggagatcctggcaacatgtgcccaaggtggtcagggcacagcttgcttttatacattttagggagacatgagacatcaatcaatatatgcaaggtgaacattggttcagtctggaaaggcaggaaagcttgaagcaaaggcaggaagactccaagcagggagggggcttgcaggtcacagataggtgagagacaaagggtcccattcttctgagtttctgatgagcctttccaaaggaggccatcagatctgcattgatctcagtgagcagagggatgactttgaagagaatgagaagcaggtttgccctaacgcagcttgcgttttccttgtagcttagtgatttggggttcaagatattttcctttcacccctcattcttctcctgaaccaacagaagaagagatgcagagtgccgttgatcatttaaaaggctggacttcaaaactgccctttggtagtgacatcctgatattccaattctgtcccatagctacttgcactttaacccctcgaggttatcctaaacttgaatcagggcaactgatgacatcaatttctggacacccaatccatccaactagatttcacttgcaaatttaaaattgttgagttgcaactgatgtacctgtacctttctttgaagtcttttaggggaaaaagggcacatatgcaatttgcattttttttttttctgaggcagagtctcgctctgtcacctaggctggagtgcagtgacaccatctcagctcatgcaacctctgcttccctggttcaagccattctcctgcatcagcctcttgagtagctgggattccaggcacccgccaccacgcctggctaatttttgtatttttagtagagacgagatttcgccatgttggccaggctgatctggaactcttcacctcaggtgatcccccgctgcctcctgcctcagcctccctaagtgctgggatttgatcccccgccaccgcctgccttggcctcccttagtgctaggattacaggtgtgagccaccacacctggccacaatttgcacttttaatgaaaccaggtgaaaagagggtgtccttgagcaatagcctttatgatatgagtagacacctatctgagccctcccttgagaaacagtcagcgcctttgtggtttcgttcttttccttcttacctttgctttgccgtgactctcatcagtggtttttcctttagatttcgaatgaagcaagtgaacattgttgggccgagcccctacagtccgtcttcccgggtcatccagaccctgcaggccccacccgacgtggctccaaccagcgtcacggtccgtactgccagtgagaccagcctgcggcttcgctgggtggtgagtgggggtgagaagggaggctggaggcacacgggtcctgagtgagccagggcacacactaatccagggcttaggagtttcttagtcacgcctttgtcctagtcaaaactaatctcatcgtcaaaccaaaaagtattgcattttacaattagtgttggatctcaggccagcccaggagatctgattaattagtagcattactcactctcttcttggaactgaggaatattccttggggcaggaaagctgggggtgcctcacaccagaactctaagtccttaagctaggtcaacatggaaccaatactcaatatttgtaagagagccagcctgatatttaatcagaacatttgcccacaaaattaagccaaaatgtattaaaagaaattatatgcagccaaagttactgacagggtttcatttaattcacagaacaaaagtttcagggaagaataaagtagatccttctaagactatttcccccaggaacacctcctccacggagttggcctcacagggcaggcccatcccttacaacccgtgagggtggcagttctgagatgtcagctcatcgcgactcctcgttccttcctagcccctgccggattctcagtacaacgggaaccccgagtccgtgggctacaggattaagtactggcgctcagacctccagtcctcagcagtggcccaagtcgtcagtgaccggctggagagagaattcaccatcgaggagctggaggagtggatggaatacgagctgcagatgcaggccttcaacgccgtcggggctgggccgtggagcgaggtggtgcggggccggacgcgggagtcaggtgaggggaaggcgattcccatcctggagacaccgcattagagatggggctgagtgcccctgagcctccagatcccaggctagtggcgtctcattggcctgtcccacttgtgtctgtcttggagctttcctaatcccgggtttggccagactcggcaggaatttctgtctgatttcattagggccccaagccattcattggaaactggtgatgatttccaacaggggatcgactcacattactgttttctaaattagggataattttcgctaacgatgaaaagcaagaatgtgtaaagttcctatggggaatctttaaaatacaaggtattcaggaccttcttgtcacaaattaatagacgtagtatgttaagtaatctagcctgtggtaataaataggcctctaaaagtttaattgcttgaacataataggagtttacttctcactcatattgtggtctaaggtgggcgttcctgtttggcgggtggctctcttccacaaggtgattcagggacccaggctttaccgttctgtgggactaatctccttctgcacccagctgccagcagggaaaagaaggcaaagaatggacctcttcagacctgttcaggagtggaacgtcactctgttcatcttcttggggctcagtcatggggctctgccagttgccaggaagcaatggagcagtgtttttggccaaccttgagcagacctctgctgccctgtgctaatgctgaaagtggctgcctaatcttctgggctttgtggactaacttccgctggccaactgtgggtcataggagcttttcttgcccccctccttaaatttttagaaacccaaaggaaggacggcaattaacgctcatgaaggactcactgtcacctgaccccggtcccttcagtctgatctgaattagtgaggttctgtctggagaaggaatgaaccagctgcacctctgccccaggcttcttggatgagagtcacagcttgtgcttgacagatggaggggctgttcattctggactaacctaggctgttagaaatacaacttaaattcctgacctttgtccagacatgggatgaggaggaggtatgaagggttgagatggtgaactgggtcagtggccagaggaaaagaacaagactcccccactccttcccccagggagcctagatccattttgcttattgatgtcaaaccctcttattcgctctcttttgcttctcttctctgactctctgcgttaatgagaatatttggctccattgtttttgctgtcgtagacatggctctgtttcctggagacagctcctgagcccagcatgagtcctcctttccttggggctcccagggcacagaatcgctcttgaagctggggagtcaagagatggccagggcctgcccacagctgtttccaccccagagtcctcggaaatgccccggatctgccctctctgcaacccagagcctccctgcttctgtccctgtactacaatgccgtgcaaagagacagtccccctgttgttgttttcagtagaaaaattaattaacttgctagatgctggaaactgccttaggagacacagttggaactcagagtgactttgatgggaaatggacagaaagatgagctaggaagccaagtgcgtgacgggtatcagagaaaacctcgcacagtcagcaggaggaggcggatgacgtgggggcacaaggcctgttggcatgggtggaggtggctttggggggctgccatcctcaggacagaggagtttaaaagggaggaaagcatagacacttggggggcccagggctcccgggcctggcctgtctgctctaaagatgaagagggaaacatagaaggtggtgccgaggtgggagggcagcctctgaggacagctggagtgaggacgcagatcagctcccagcaataaggaaaggggacttggagccctgggcggtgccaccccctcacctcttcctaatgctcatcttatccgtgccaggtgctgcaatgggtgcaggtattcccaacaccacccctccaccctcgagacagccaggccggggtgaggagtctgcaccctgggcttgggtccagcagcgcccagcacaccgagggcaccagcacgtgcccagtgcatctgcacgtgccacccgctctgtgtgccacagcgtggaagggcctgggaagctctggataaaggctcctctcatcctttcttgctcattccccgggtcccgttggtgacaggtctgaacctgccgccacccttgtaggttactgtaatgcacagtgggttgcaatgcacagaagccccctgggtttcctcaatgctggttaactttcagccaccagcaccaagccaaagctcctgtgccactttgtggctttatttcttcctactcttctcagagggcaggaggtgagggtagacaggaggactcttaagcagtagcagggagaagcagaaccatggccttgtgggaatgctgttagggcgtggcgtgaaccctggagcccaccaatgagagccccggaagagcagccgtggtgacaaccagtgtgcttctgagaggaccagtgtttcaggatggaactgcccaagcagcagggctgggcccagtgtccctcggctctccttcagactgaagctttcattacgttccaaaggaaaggtggagacgcacccacatgcagcctgggattgtggtcacgtggatttcaaaaatctctgttatcttcactgtctgaatctttgtgacaaaggagagaacttgagaagttcagagggacagttctaaatccagtaaaaggcaggccaagaaaatagtttttcagaattaaaacttctgccataaccaacaaaaacttatggataaaatataactttctggaatcttaaatgtattggccaggcagggtcctcacacctgtaatcccagcactttgggaagctgagtctggaggatagcttgagtccaggagttcaagaccagcctaggcaacatagtgagaccccatctctacaaaaaatacaaaaattagccaggtgtggtggcatgcacctgtagccccagctccttgggaggctgaggcaggaagatggcttgggcctgggagtttgaggctgcactgagctatgatcgcaccactgcattccagcctggccaacggagcaggttattatgcctctaaaaaataagtaaataaatgaattcatcaacacactcataagaaaaacagggaaatcctcaggtgtcagaggcataacaggaactagaaagagttcagcaggaagtgctgggctggtgccgcagctgccctgggtgggataggatcaggttggatctttcctggtggtttcaggacctggggtaaggagtctgcaccctggtcctgggcccagcagtgcccagcacactgtgggcaccagcacgcatccagtgtgtctgcaggtgccaccgggaactgtagatacactgggcaggccatgcagtaacatgagagtcagctttgaatctgtgtaagggaagagttagggcctaaactcctgcagttgagacacggctcttgaaggcctttccctccttcctaggagaggctgaaactctgcctgcagaggtttgactgtatgtctacctggactctgagtagagaatgaaaagtcagtctgagccctgtgcccagctcaggactgggttttgaatttgcattatatggatggcccaggaactcccagaacagaaattaatgtaacatttggttccagaaaccaaaagcacgagcaactaaagaaaaagtagatacattagacctcatcagaatgaaaacctttatgcttcaaagaatgtcataaaggaaatgaaaaaaactccccaaatggaagaaaatatttgcaaattatgtatctcatgagggatttatatctagaatatataaagacttcacaacaaaaagacaaatgacccagttaaaaactgggcaaaggatcggcatagacattcctcccaaggagatttacaaatggccaccaagcacatgaaaacatgctcaacatcattaactgttagggaaatgcaaatctaagctgcaatgagataccacttcacactcctaaaataagatggctaaaataagaaaagttggacaataacaggtattggtgggcatagagaaattggaatgcttgtacgttgctggtgggaatattaaatgattcagaaacgttggaaaacagttggcattcctcaggaggttgagcagggagtcaccatacgacaaagcaactctactcctaggtatgtacccaagagagcagaaaacatatgtctacacaaaatcttgcacataaatgttcatagcagctttatccatagtagccgaaaagtggaaacaaccaaaatatcactcagttgacaaatggataaataaaatgtggtctatgcattcaatggatgattcagcaataaaaaggaatggaattctgatacatgctacagtgtgggtgaaccttgaaaacattaggctaagtgaaagagaccaggcacaagagaccacatattgtgtgattctatttgtaggaaacatctagaataggcaaatctagagaggcagaaagtaaattcatggtttcctagactaagagagagcatttgagaggaatgggaagtgatgggtgatggaaacagagcttcttttggggatgatgagatgttccaaagttcatcatgatgatggttacacaactctgaattcactaaaaaatgttgaattgtacaatttaggggaattgtatgatatattaataatctcacaataaggctttaaaaaaaaagctcagccttcctgagattaattttatacagataaaatgttattaaaataagtatgggctgggggctgtgattcgtacctgtaatcccaacactttgagaggcagaggcaggaggattaccaggagcttaagaccagcctgggcaacatagcaagaccccatctctacaaaataaaaataaaaactatagaaaattagccaggcatggtagcacatgcctgtagtcccagctacttgggaggctgaggcaggagaactgcttcagcccaggaggtcgagcctgccatgaactacgatcatacccctgcactgcagcctgggtggcagagcaagaccctgtctctaaaaaaaataataagaatggctcatagattgtacactttgcgtatggttggaaggcccagaaaatctgtgtgtaatatcttcttaccctcagggaaaacagtgatcaactcttcctgaaatagttacatatcataccccaataaaggattttactctcctccaaaaataaaacaaaaagaaaatacacaaaaaactaaagaaacatggtttcaggccagaccatctgggcaatcaacagaagcaaaaatgattcctctctggagagatattgccaaagccaaattatccaaaataaaaagcctttttaaagatgaatcacaattgtcaagcacacaggcaatgatttgccatgagtaaaaatgaccagttttaaaaaaagagagaaagatagagggcttcaattacattaacatacatacaagtctgagagaaatatataataactacatttaaaattattaaagtcttagtaaaataaagcgttaacattttaagtaaagattaaggtaccatttcttaaagcagatttgtttttagaaaaaataaatgggacacagtcattgaaaatgaaagcagtttagacactgtcaaaaagagaattaccaaattaaaagctagatttgagtaaataactcttaaaacaacataaagacataagattgaaaatagagattaaaagacttgaagaacagaatgagatctaccacatagctaataggactcgaaagaggaagcaaatgagagttacaaaatacacagagataatagccgagaaattccagggttgatggaaagcattatttacaagactgaagaaacaccaatcccgagtggagtaaataaaactgaattcataccaagatgtatttgctacaactgtaaaatgccaaagagaaaaatcttaaaaacaattggagtgaaaggcaaataatcacaaaggcaagaccatttgactgaggtgactattcaggaacaacagaggccagaagacaatgggataataatctcgaaggagctaaaagcaagtaactgccaacctcaaattttatacccagataaactaatcttccaggattttattcagaaaacagcaaagtaaatgctatataaaaatgaagacaatttaatcaaaatagatatattgttttgataatttttcaaataatactcttttttttgaggtggagtctcactctgtcacctgggctggagtgcagtggcatgatcttggctcactgcaacctctgcctcctgggtgcaagcgattctcctgccttagcctcccaagtagctgggattacaggtgcccaccaccatgaccagctaattttgtatttttagtagagatggggtttcaccatgttggccaggctggtcttgaactcctgacctcaagttatctgcccaacttggtttcccaaggtgctgggattacaggcataagccaccacacccggccaagaacactcttttaaaaaaaaaaaaaaagaaagaaacctatggcaaaactgctgatttgagactcttttttttttaaacaaacatttccagctgttgaaaacctatctttatagtagtcaagagaatgcagaggataatattttatgtgtaaatgtattccagggtttttcttctgactttgttttttttcagacaatcttgtatcatcttttacacaagaaccctgaggagactttctctagcgatgttgtttatttttgtagatgctactgtgttttaattaatattgagatatagattttgtatcaaaagaagcaagtggatttacctttgtcctagctgattgtagcatgtatggtgatacggtttggctccctgtccccacccaaatctcatctcaaattgtaatctccacatgtcaagggagggacctggtgggaggtgattggatcatgggggcaatttccgccatgctgttctcatgatagtgagtgagttctcacaagatctgatggttttataaggggctcttcctcctttactctctcttttctctcctgctggcatgtgaggaagttccttgcttccccttcaccttccatcacgattgtaatcctgaggcctctccagccatgtgtaactctgagtcaattaaacctctttcctttataaactacccagtattgggtatttatttatcacagtgtgaaaatggactgatacatatggctagaggggaatcacatagagcccttgcagaatcccctgtatcagcctcactgtttttctgttcatagttcatgttctgttcacttgttcagaggattttgatcaagagtaggaattgttcttgcaactgaagctttgttttgtcagttattacattctttcttattttgagggttatagcttatggaagggtattttttagtttctaattgaatgtgtgtttaattagaaactggtgcaacacatattgctctgggaaaaaaagttttggttcacgtgtttccatcaaaaattttataattgggttattgatcttcatttcaagatgtggatgattcagattctggacatgttgaatgctggaataacgagctcccagggacccctcttagaccagtctctcttctggttggtgctggtgctccatctctgcccctcctaccacctggggaatctcaggggcccagatgctgcaggacttccgctccccctccttgtgtttagctcatcagaacggagatttcacagccttcttctctgggaatctccccacctctgactggcaaggccctcccaggtgcagcagttttgactttgggccttccctggccctactaacatctgaaacttactctccccagcagaaaactcgatccttttttgaaatggggggaggcagggatgagatggggaggtgaaggggttgccagggctgaatggtgagtggacctgatggagagggagaaggattggagagagaataaaacaactgccttttgtctgaaataagtctcccctcaatggaaatagcagctcctgggagcttaggaatggcccagtgtgcaggagtgctgaaaacacgcagagaacacacagcagaatgctcggagccacatttcaatgaagtttacagttttgaagtgcagtttaacaggttctgtgacatcttatgatatattatgatatattctaaggataaatgaggccttaaaaaccgagagagaccacatgaggaggaacagtgagctgcatagtgtgaaatcctacagaggggagagaaaaaaatgaaggagaaaagaagccatggaatggctttgtttttaatgaaaggggaattcccaagaacatctcaaaacgtaagatgtcaggttggaaagggagttgaatctacttcaaaatagatgatgggtaagaggtttctttttcaattcttgaaaactttgcaactccatggcagatcttgtcctcgtaggatttaaatgcgctgaaatttccatcctgaactctgccattttctttgctttagctgcctcacctccctatctccacgtgagaagttcagctgcgttcaaagccccgttggtgtccgaattgctgcaatccccaggttgccctctttctccagggacggggttggctctccagtaaatacctgctcatcccaccacatcttagaaaaacagctgtgatttgtaggtctatagggagaattgggcactcacagtttcccacaggaagcagttaaagattacagaagtagaccatttgtgttgctatgacaatggcctctctttttgcagacagggacagaggttttagaacctggtaccaacgtcttgggcatacagtgtttggtgttcttaccttattctaaatatattcggatacgttgtaggtttacattttttttttaatgttagtgccccctttagctcatagttgattcaaggtcccagtttatcaaacttttgtataaaatgagcaatgtgcaagccatttcctggtaacagccatggtggcatttaagacaccctatgggagctctgtgcaggcccagggagcaggagtgagccgggtggagccacagctggaaggcaccagggacttggggctgcatctgtgacaagcccccttcctctttggagaactgagcaaacttcacattgcaagtattccctttccgtgacacctctctactcaaataaatggatagtatttcatagaagcactgagtaactgaatgaatgactctcaactgacatatttgggaagattggactggctggcattatctccctccaaaaatagaagggggctcacagtgtttttatagtgacaggcatcactgggggttttctattttgtggacacattcactgacctacacccagcagccgatctaatgtccatgcagggaaggtgctcagcatggtagggggagaagggaagggagagatgctgcctcccagggctctcaggatcagggagcgtgccccttcctgggggcaggcatcccaggcctttgctctgcaggttcctctgtggtttcagagaccccacagggtgtggtgagggttgcggtgaggccactgactcgcgtcctgaggcttagtcatcctcagccgctggccctgttaggctatggcctgctttggggctgtcctttctcgcccctcccttgtctagggaaacacctgtttgtggtggtgaggcgagaagcttcccacacagcatgagaacagctcttctaggatgcacatgaaccctggcattgtcttaaagactgtgttcgtgtcatagcagaatgccccaaacggggtggcttaaatgacagaaatgttttctgttaccattctggaaggtggaatctgagctggaggtgttggcagggccatgatccccctgaaagcttgggaaggatctgtcctgggcccctctccagcatctggtggttccgtggctcggacagcctctctcccatgtccccacagagttctccctgtgtgtgtctgtctcctcccatggcactctccctgttgtgtgtctgtggacaaattcctttttttatatgggcactagtcatactggatcaggggcccaccctatgcagtatgaccgcatcttaacgagttacatctgcaacaactgtgtctccaaataaggtcaccttctgagataccggaggttaggataacaaaataaggattcagggggcacaagttcaagccataacaaagatcaaactactctcgtgtagaaaatcttgcaattaaatgtcataggttgcattattgtgcaagccccccaccatgttactttctgtcttcagactaactaacagtgctaccctctcagtctctgtgtaatgaggaagtctgaatgtctgaaggaatagatgagtgaatggatggatggataggtgatgggcgaatggatggatgggtggatggtagatgaatggatgggtggatggatggatggatggatggatgggtgggtagatggatggatagatggatggatggatgggtgatgggtggatgattggatgtatggatggatgatagatggatgagtgaatggatggatgggtaaatggatggatgaatgaatagatggatggatggatgggtaatgggtggatggatggatggatggatgatggatggatgagtgaatggatggatgggtgaatggatggatggaaagatggaatgatcgatttatggatggatggatgggtggatggatggatggatgggtgatggatggatggatggatggatgggtagatggatagatggatgatggatggaggaatgaatggatggatgggtgatggatggatggatatgtagatggatagatggatggaggaatgaatcgatggatgggtgaatggatggatgaatgaatagatggatggatggatggatggatgaatggatgggtgatgggtgggtggatggatggatagatggatggatgatggatggatggatgagtgaatggatgaatgggtgaatggatgaatggatggatggatcactggatggattgattgatggatggatggatggatggatggagatggatggatggttggatggatagatgagtgggtctatgaaagagcagaggaagtcctcgcaagtgttcctgctacagaggtgcatgtgtgcatcctgctgttcttggagccctagtagggcttgtgaaggagaaggaaacagatgcttctactcacctctgtgtgccagtgccctaccaggcacctcagtgtttgctttcattctcactctaaaggctaggactggtcatagcatcctcctttcactttcttcaaaacaactagctattgatcacctgctgaccaacaagtgctgaccaccaggaggggagagtgagaagactcttaagtaaggaaggtaggccaggcttagcctttcacaagtgggacaactgaggcacaggtgatcagagcagcatctccagctcccaccctgagtccggccttactccatcactccaggctatttccctgggtatcctggagaccacctgattcaaaaggagactttgccaccaaacagtatcctcccagaacctccgttgcttcatctgcagagtgaacccccgaatgggatatggtggacttgaagtgtctctcctcctttttcaaccatgggggccctgaagtatggcgggatcttcagtcccagctgagagcagctcctccatgctgtttataaacagggccttccctgactgctaggggctagctcaggtccaggttttcctatctgaatggtgtttgaagtttaaatcggtccacaagaaaattaacaaagcaaatggagattgtctagaatataatacccttgtttttaaagtttcactgcttttatacatattatatctgaatcagtgcaaacatatcaagacaaattagttcagtgatgttgtacacagaagagagatttcatgaaagtaagaaaatgatcttacatgtgggccgggagtggtggctcacgcctgtaatcccagcacttgggaggccgaggcggacaaatcacttgaggtcaggcattcgagaccagcctggccaacatggtaaaaccccatctctagtaaaaattcaaaaatcagccaggcgtggtggcacatgcctgtaatcccagctacttgggaggctgagacaggagaatggcttgaacccaggaggcgaagttgcagtgagccaagatcgcaccactgctctccagtctgaaataaagaaaagaaaattttcttacatgtgtatgggtcgagaatggcatggctggcctcggctgcccatctccttttagaaaaacattcattgaaatggatgaatgcgattttctcagctttagttttctgatcggtagaaaaggggtaacgatacctacttcattgggatcattgtgggattagatgcaattatgtaactgaaggcagttggcacagacaggcactggataagcacctagtcaacctaccctcccttccccttcttttgtgtaaatcctcacgcccccttctctcttcagcttctcctgtccctatcacagaataccacatttagagctgtcagtgaacaggcatgtgtctgaaagtcaggatttcctatttgagataaaagtctgcagtttccacaagttaatacagcaaacagaccaagcatcttttttttcttgcttggtggactcaggtaaaattgagctgctaagtacccaggatttatggaatttgttgctaatattaaagagatttacatgtccgttatactcctgtaggtttaatctgatcactacaaaatgcttagaatacgttgctatttcaaggacaacttgattatttgggtgaaagctggatctttgtatgtagacactctagattttggatgctaatctacttcattggttctttgcagttccttcagccgcccctgagaacgtgtcagccgaggctgtcagctcgacccagattttactgacatggacatccgtgccggaacaggaccagaatgggctcatactgggctacaaggtgtgtgatcacaggatgacctccctttgcttaaagagtgggctggggaaatgggagcatgtgctattcccccaaagcaacgagcttcctcttctcctacagatctgcagcgtcagccagtttgtgatttttattaagatattcagttgtcttatctaagcctcattgcagcctgggaattaggcatcagtataactatgacacaaatgccaaaacagggcaccagaagaaaagcacagccggagtggaactgacctccgggcctgcgcctgactctgccctcgctggcctcagtgccgcgggccagttactgaagccctgtgcttgtgtctccccgcttgtaaaacgggaataacgatggtagctttgtcccagggttggtgtgagaattcagggggtcttttacacagcacgccttgctcatgtgaagggctgggtgaggtggatcgctgtgtgcatgtttctatgtgtgtcatcacggtcctagcaatggcatccgctggcagggttgaatctgtcccagcttctctggggagccatttctgggttccatcttccatgcatccaccccacccctttaaaacccccttctgttcctcgttccatcactcggggcgacaggctctgtctccccatctgctccttggctcagcaatgccaagcatcagaatgagctgtttcggacccggccagcgaggccacgcttgtctcagtgctgctccctgggttttgagcgtgcctcctccacctttccgtacttcacatccctattctttgttttccccgcctgctctcccatgtcttctcccttccccgggtgttctaagtgcgccctgctggctctgtgacacatggcagtcccgttgaggggattcagtgaccaaaacttcacaccacattcctggggccccgagaaacgcgcttgctgtgctattttcaaacacctccctgctgatgctatcctttatggccttccaggtccccgatctcagggagcagttcagagaaggtgggcattgagtgaggtcttagcaggaggccctggagcagagcagcttggggtggggtgccctggaggagagcatagaggagagcagcttggggtggggtcccctggaggagagcagcttggggttgggtgccctggaatagagcagcttggggtggggtgccctggaatagagcagcttggggtggggtgccctggaatagagcagcttggggtagggtgccctggaatagagcagcttggggtggggtcccctggaggagagcagcttagggttgggtgccctggaggagagcaccttggggtagggtgccctggaatagagcagcttggagtggggtcccctggaatagagcagcttggggtggggtgccctggaggagagcagcttggggtggggtcccctggaggagagcagcttggggtggggtcccctggaggagagcagcttggggtggggtcccctggaggagagcagcttggggtggggtgccctggaggagagcacagaggacagcagcttggggtgggatcccctggactagagcagcttggggtggagtcccctggaatagagcagcttggggtggggtgccctggaagagagcagcttggggtggggtcccctggaggagagcagcttagggttgggtgccctggaggagagcaccttggggtagggtgccctggaatagagcagctcggggtggggtcccctggaatagagcagcttggggtggggtgccctggaggagagcaacttggggttgggtgccctggaatagagcagctcggggtggggtcccctggaatagagcagcttggggtggggtgccctggaggacagcagcttggggttgggtgccctggaatagagcagcttggggtggggtgccctggaggacagcagcttggggtggggtacctacagcatgcacagctgcagatggcccaaggaggccagagctcccggtctgtgtgaggacagcaggtcttctggggcaggaaaccagcttccatggctggaaaacccagggggctgctggctcctgtggcaggaagcagagtgttgtctgtgttcataatcgagtctttgttttagtggctgtggttggcatggctgcagttgggccctcagatcttgcagattatgaccaggcagcaggctcgccaagccgtgggcactaactcaagctcccctggagcgcagtcactttacaaccaccttcctccccaaatgccagcatggacaaattagatccagaagccctgcacacagccatcctcagggagaaagcacagttggctgggccttgattcacgaagggggcctgccccatgccacggcggtccctcctggcacccgcctcctgataaccctcgtgctgtgtcgataccacagatcctgttccgggccaaagacctggatcccgagcccaggagccacatcgtgcgagggaaccacacgcagtcggccctgctggcaggcctgcgcaagttcgtgctctacgagctccaggtgctggcgttcacccgcatcgggaacggggtccccagcacgcccctcatcctggagcgcaccaaagacgatggtaggtccagggttcgcgccttcgggagccttgctgcctcccaggttggcctttccaatgcaaacaatttggattgttgtcgcttttaacttaattttcaaaccactttcttttgcagttgagggaaacaaaacaaaattgtttttcagtcactgagcacttatatggccaatttcagcctggagtggatttttacagcctaattatgaacctgtactgagtttccctcataactctgccgtgggcagtgctggggagaggcagcagaggctggggcggggccgagctgtggatgtcagctgtggacgctcctcttggcaggggctccacacacttcgtgtagtgcccccttatctggcaacacatcccaggaccccagggaatgcctgaaactgcagataaaaggagactactatagtttaaaaaatccacagtggacctcatgccttacttccctcggtactgccccgtctcactgtttgcattgtgggaggtaattagaggttatagaaagccccgtgctggatggcccagggtccccagctccctgagtttctggacctgaatcacaaggacgccttgccagctttgttttcatggaactctaaatcatcggtaaatatgttttcccactctgcagatgtcaaacacataaaggttagcgcctttacattttcattattaaacagactgtaatgaatacatcagggagagaaatgcggatctctcccgccacaacacccaccctggggatcggagtggctgaagaagtgaaacacctgtaggttttcttaagcatctttgctgagtaactaaatgagcccgaaagtcctcttaactgctgagtggaaagcactctctccacgttgctgagagagtgccacccctgatcctcgcctcgcctcacggagagacgggaaccctgcagaaggctttgtccatccttccctgacacaaggtctcaggctagagggagatccaggagggaatgggaatgtggatgttgtttccttgcaaaactatctcctgctccagtgtattccaggtttcccagatgaaagtaaaaatgggcctattagaaactgtgtgtaacagcaggcccactgcaactgttccctcctgaagcaggcgctggtgagtcctggaatgccgctgcttcctctcccacagcgctcctgtagacatgccttcctcctctgctttccagcataatccccataaacagcctgggagagggctcaggggagcaacgctgcttaagtctgaagtcagcgtttgcgtatctgtgacttagtcctagttgggagcctgtggcctcctacagacatttatttcaccccaaaataggcgtcataacacacattcagaatttaaaatactgttcccagcttcatagccagggacagacgtcagcggcccagaacgacgaacatacatccttttattttgatattgattgtttcatgcccattgcctcttacctgggaatcggtcagttattaattccaacaagaagctctcatactggccacacacttacttgcctgttcgtttaagtaaatgtattttatgagggccacaaccctattattcagcagttccaccacacctagctgctttttcagttattggtgccccgaaccacacacaagaattattatatgcatttgtgcacaccaactcttaattatctaggatgatgcaggagagaggtggcatgcctacgagagaaatgattgaggatacacgttatttcatcagaaattgtaacctccgttagagttgggaggaacttcaggccgcctcatctaccacctgctttgcagatgtcaaacccagtaagggaatccgagctcagatgagggaaatccttcctctcaacctgatgtttgctctcagagtcatttagtgactggtctacttgtgtcctggtaggctggttacactcacactattcctggcatagttcgtgaaccctgcttttgagtcttggaaagcagacgggcagggtttaaagggaagtgtttgctcaagatccttagggagccacactaccagtgacattccaaaagtcatcagtccaaaactttagggggttctaaacccacgacagtgtagcctgtggtagttactgcagccagctgaccctcggaatcctgtgtaacctgtcacgcacccaaggaacactgtcttgagatctgaatccctgtggtttttcccttcagccccaggcccaccagtgaggctcgtgttccccgaagtgagactcacctccgtgcggatagtgtggcaacctccggaggagcccaacggcatcatcctgggtaagggagcggcggtggccgggcgtggtggctcaggcctgtcatcccagcaccttgggagaccgaggcaggtggtttgcttgagcccaggagttcaagaccagcctgggcaacattgtgagaccccatctctccaaagaaaaaattcagactattagccgggcatgatggcatgcacctgttggtcccagctacttgggaggctaaggtgggaggatcgcttgagcccaggaggttgaggctgcagtgagccaagattgcatcactgcactccagcctgagagagagtgcaagaccctatccccaaaataagaaaaaaaaaggagtgatggtatttaaaaggagagaaataacaatcaagttgatgtcttccgtgtttgttagatgtttatgaggttaaacaaaaggctgtctccagcagcctagcatttcctgagccgagatgatcatgggcctcttgactgttttctgagctacgtactaaaggtttttcttatggaatgaaattcacatttttttaacgtggaatttcttccattcgtttgcggctcatggcgataccgtttgtaaccgaccttcccttcctctctgaaatatcaggctatgttgatgtgtgtttgagaaacaacaggctagtttttcagagaagatgcagacctagccttggttcccatgttcctggaaacatctttctgctgcagcacttgcacccaatccttgtaagaagccgctgagatgaagcgcatgccctgggtcccggggaacgcgtttacttctgacttttcagcattacagccagcataccaactctggtaacacagatgaaaagcctgaatttttccgttccccaaagcaacaaattctattttaaaacatcccagttccttgactcattcaccctttcacagagacaaagtaaggactttccctgtgcaggtgtcgtatgtacagtggggggtgaggaatgaatgaggtgtgcctgtcctcaagttgcccacagtcccgtaagggagacacatgttgagagtacagtgagataagccatctgaaagaggtttcattcagtgcctcacacacagctccttctgggtggggtctctgtgggtggaagtctccttttgagagggatctggagataggtggcttctaaagccttggaagaagggaagggggctgtccactcagccaagaccgaatgctttcagcctttgggagcactgacagctccaaggctggggatggaggctgggccgggtcttgagctactgtgagctccctgctgtgtcctggagaatgtggccctgagacctggacgttttaaactggcctgttagaggcaagtgcagcagccacagaacattgccccagccccaggttagctctcgggatattgccataccagacaccccgattcggctagcctgtgttctaggtgatttacggtaaagttataaacccagacttacaaacaggtggtaaaattcaccacttttgcctgcatttgatcttaggattctaagacttggtttgaagaaagagtttcacatcactaaaaaaaagtttggaggcctgtgttgaacggcagcaggaattcatccaaggtctttgagtgggaaagctgcgcaatcagatttgccttgtaggtaatcactccggcagcctgagaagggtggacggaaagtcagatatttattgagcccttgcttccctgagagggggcctggagcttcctaagtcttctgcacaaggaggctgtgacctattttcgctttgcctctttctttatgtgatttctggagttgctagacagaagtgtttggctttgagtacggcatttctcaatcaggtgacctttggaattgcgggttcctgctactaaaatctcagttgagcagccaccttggaggtgagcatttcagggcctggcccggcggagagggagctacgagccacatctggtgcctgcgcagtgagcccagtcttggggtaggaaatggtctgcccagcagacagctgtggcgaggagatttgcaggagccccacccaggcaggccctaacctcagcacagcacccaggcatcagccttttctggaacaagcagggctaatatctgattacccgggagctgtccccagcatgctgtgaaacaagaaacattgacagagtcacaggagtccacaacaacagtgttccccgtgaagaagcaggctcgccccagccccacctccaccctggcagggcccctggctcccactgccggcctcggtagaccctcccggcaagtcctcactctatggtcacctccgtccactcactgtcagcttaccgggctcccaaggatcagttctggagtgcggaggcgtgggagcggtgcaggagcaaagcatgtgcttcatctgtgcttctctcttgccacagacggacgcgtgctcagattccagtactgtgactttgacccagggcgtccttgcacacgtggggaggctctggcctcagccggctctaggccccgccctctgcctgacacccacttcagggcatctgccctttctgaggactcacgccgatgtcctctgtagccccgggtcctcactgccccgctccctgcacgtgtctacctggtgaggcttctcctcagcacgcctgccggagtgaggcctgctgtccactgagcccatcagctggttttatcatctgtcgtttactttccagactgtctctgacatttctttttccgatgacaagagcactataaaatgataattgaggccacaatgaaatcccatttcacattcgccagatttggcaccataagtagctgtgataatgccatgtttacatgaggatctggagaaacaagacccctacacccttgccaggagcgggagtttgtgcgtccactttggggagtgctcaccaggaaaggtgagcgcattcacactgcaccccagacgctctgcacttccaggccttcgccctagagaaattcttgcctgtgtgcacaaggagaaacgtacaaggatgttcattacagattcactgaaatagcaagaaagaaagcagctgtcgtctgcacaagtcagatggcacgaaccttggggctgcctgcttttcctttcccctgtgttttcaacactgcatcacggacaagtaggccggcagcctgggtaacgttttggactcagatctcagcctatgcttattagctgagtgaatttatgcgtgtttcttagcattcccatgcctcagtttccccatccctcaaaagggaagcacattcgtgcctccctcactggttagagttgcacttagaacagtgcctgccacatagtgagtgctgagtaaacgttagcttccgtatcagatcgaatatttcatcgtttccctggcaccagaggaggctggaggctccctggacttgagagctcctcctagaccattgggggctcagtctggtcctagtattcccgttgcatgcagcagtggtgtgctgccttgatttgtcctccataactctggttgctgaagcagaggcttcttgccgacaagagaaagaaaacttagaaggctgcttgggttacagagtgttcctaaagtgcgtcgggaggtatggatcttgatttgtggtcactgaaagccactgaagcccaagtgaggagaaggataatcacttaaatactttgagccctccaaccgtgctgaacgctgctgaatcacacagcaccgtgtctacctgcgaggcagacaacgtcactgccgagcctcctctgtcatgcagcattggcttgtaattgtaatgcatgttgtccgggtaacctgtcacccatgggtcattacagccggcacaccacacggcggaggctgcaggaagacaggaagacaattcctgcaaattcagatgggtgttcacaggggagaaagcaaaacatcttttcgtctgactcactttacatccagagaccttgaatcaatgttcccactctggcagcttggccttctgagtacataaacacctctgccgcccgagcttttgtaatctatatcaaaacatgttcttgcatttccaaaagagattaacagcgtgaaccacagcaggcacctagaggagaaaacacttgcttatttgcgtaaatattttactgtggagtgcttttagcatttagaacttttctttgggaggatggggttggaaccccctgagtacagacgtccctccctcacccaccagctgacaccacatggccttgactggtattacactaacgtgatgatgcgtgagctcttcagacccacttgggcctgccctggccagacacgcgggatcccgccctgccagcaggagggcctaacatttacctttaagcttattacgaagggtgtgcgggaactctgcggagaatcaggagctccagcaaatatgatccctgttggcagattcagcgttttgatccccagcccttggatggataagctgcaaaacccacaggccacggcatctaggctcggccagcgtgggcgtcctggggcgattcagtggcttgcgggttctctgacccacttgcccaccaacagcagctgcagagagatcggcagcacgtgccccagatggtcgtgctttggagtcatgagcgctggggtcccagtgatgctcactgaacagcaactctcagacaatgccttttgtttcccagggaagtgcacaatttattaaaggtttgcaactagctgggcacggtggcacacacctgtaatcccagctactcagggggctgaggcatgagaatggcttgaacccgggaggcggaggttgcagtgagccaagatcgtgccactgcactccagcctgggtgacagagcgagactctatctcaaaggctttgcagccacctaaaacgtccggatagaagtctccaaattgctctgtgtatagctgtgcggcgtcagtcttcaggctgacctggagctgagatgcctacaaggcttccagtatccagcctcagctccttagtgccaccttcttgtgtctcgagcagtggacggttctggaacttgtctcaggcccgtggcgcagtccctttctggattctgattgtctaaatgcgcagtgccacctccgtcttccaggtgtattcagaaacccactcaggcctctcacttgatgtttttaatcttccatttggatcaatgtgtctcgtacttggccttgctccttttaatgctcatattatcataattcacccatacccttaaaaacagggctcctcgtaagccgcattttactgctgctattgattcggcctgttcattcctccctcgcacacgccgccgtcttctggccttgcgtcgctgaagtgcagcgcactgatgtttctgatctcgctgtaaccgtaattacataactagccttttccacagaaacgctcttatctctgaacaccatctatcattattctctaaaaatgcaaggactgctactcagctgctcctttgtgccatttatgtacagaaaaaaagctgtcttctattgtccatcgagtctaggactttttaaacgtgtcaaggtgagctataggcattcatctttatgttcagcagaccgtggtgtggcgaccagctgatattatctttattttagggcaaataataggaaggtaccaatagaacacacaggccaaggagttttcttccagtgcctagggaaccagatcagagagagaagaagaacccagatttctgcaattagcagggatgccgtcgtgctttgcaatctgcatacattatctcactggggctttgccaggcctgcatcctaaaggtcaggggaggggagggcgaccccactgcaaactccccccttcctacttgggtccagcggcactgccacgcagtgcactattaaacagtcattaaaattcatgcttctaaagggaaaacatgcttttgttatgttgtgcagaaatcgcagaatgaaaaactcgtactgagtgtggaaatccgggtttgttgagtactcatatgcgtagaaaaatgattaccaaaggccaggcgtggtggctcgtgcctgtaatcccagcactttgggaggctgagaagggtggatccacgtgaggtcaggagttcgagaccagcctggccaacatggtgaaaccccgtttctactaaaaatacaaaaattagctgggcatgttggcacacacctgtaatcccacctacttgggaggctgaggcaggagaagcatttgaacctgggaggcagaggttgcagtatagccgagatcataccattacactccagcctgggcaacaatagtgaaactctgtgtcaaaaaaaaaaaaagagagaaaaagaaagaagaaggaaggagggaaggaaaagaaaaggaaagaaaattgatgactaaaaaaagtcccaagacagctacagttatctctgagtggcagcatggtcctcctgcagaccagcataccatcaccccagcttccaggccatcacctgggactctgcccaggggctttctgtggctgccggagcctgctaggttttgaggactgggccatacattcaaggggtgcccccaacagcccttagccaaccgctgagaggcagtgggcgcacactgcagctccccccgtgtcatgtgttggggacgaggctaacaggttctccaccggcccccacagtgggaggagcccagccccacggcccctgccttgatgcacacacgttcatcagcttcttctccgtctcacttctctacccacccccccctttcctggagtgacctcccaaatcgccacttgcactccagtcctggcctcaaggtctgttcgtggggcacccaccctagggccaaaggtgatttcatgggtttttttttcctgctttttttgggtggcttttatacaaaagaagcatctatctatctgtatgtataaacaactatatatgtgtgtatatatgtacgtgtgtgtgtatatgtgtgtgtgtatatgtgtgtgtgtgtatgtatatatgtgtgtgtatatgtgtgtatatgtatatatgtgtgtgtatatgtgtgtgtatatatgtgtgtgtgtgtatgtatatatgtgtgtgtatatgtgtgtgtgtatatgtatatatgtgtgtgtatatgtgtgtgtatatgtgtgtgtgtatgtgtttgtgtgtgtatgtgtgtgtgtatatgtgtgtgtgtgtgtatgtgtgtgtgtgtgtgtgtgtataatcttgaaaagctgaagccccaggagcgctatgggactgaggggctgagagctttagcaccgcatcagagggcctcgccctgcgctgtctgggctgtcttggagctgggtggagccctcgggactcaggcagggagagtccatcgatgggaaggatctggtaatggggcagggccccaggcctccctgaacaacaagaccccactgttctcccatgagcctattcattgtgcacctctgggccagctctgcaaacggtgattcctgccaggcccacactctggaagtgtgacctccagagtgccttgtccccctgtcaccacctccccgggagcacacaggttcccttcctcgtgctccggctgctgcagacagtggcgctgctcctgcaggccttctctgccgccccgctccaccccagcctgcacctcacaggctgctcgtccccctctcagatcggtggctttgcctctggcccccgctgcatagcgctctccctgggcccacctcagctgacctctttcctgatgttactccccaaggctcttcccgaggactctctttctttggcactttctggaacaattcagcctccccagatgggagccctcacatgctggaggcgtggctctggagctgggcccaagtgggacccccggccccacgatgaggggctgtttcttgatgttttgcagtttcccccactctgtgtcggtcaccttcagaatgtcctgctgagtgactttctctgaattgttttctgtttttttctcccttttctttaatcatcagaatcccatcatactgcagcaggggggagctgaggccaacagcagggtatcctgggaagagctggggctcgatgccgagggaccccagccctgccctgtttactgtgtgctcgtgggcacccagcccctccttgcctgcaaatgtgaaatggaaacaggaatatctgcctggggaatgtcatgaagtcttaatatggtagctatgaagtgcctggaatatagaggcccctaataagctgtgtctccattttaaaaaatgattaatagaggccagacacagtggctcatacctgcaatcccagcactttgagaggctgaggcagaaggatcgcttgagccgaggagttcaagaccagcctgtgcaacatagtgagaccccatctctattttaaatttttaaaaaaatgattaataccaagagatgagaactgagagtcaggcagagattagaatttgcctgagggctgggtcaggagccaggtctcccggctccctgctgtctagtcaggagcttctgagagagaggcaaggaccacacacgaaaaacaatccacaaacccgaggcagtgtatcctccaaggcaagtgaggtgaggcccacgtggggcagtgaaggggcaagtgcataaccacatgatggaagcctgtgtagtctgcggcatggccaaaggcagggctcaccttggaggacagaagagtcaggtggggccattgatagaaaggagggtctgtaagcaaacctcagacagcttggcaagaagaaaccagttcccacataatccccaaatcctgtgatccacaaggagtgcctttgaacaacatcttcatttcatctcaggattattacctctagcaatggaataatctgggcagagataaaacatggtgaaacagtaaagattaaacaataatgaaaacacgtctgtaaccatgccctgctcctgaaagtaaataatacctcattaattcagacatagtcactgaaaggcaatttggattttgagcgagaagtcttaatcacacacaactctccaacatattaagtaatgaatcaagggaactcaggtaggctggtgggatccataggaaaggcatgttcctggccatcggggatgctggggaaggccctcgttagtcgtctgtcggggccaggcctccaagcatcttccacacagggctttctctttctcttttagggataggcatgtttttgttgttgtttttgagacagagtctcgctcagtcgcccaggctggagtgcagtggcgtgatcttggctcactgcaacctccgcctcccaggttcaagtgattctcctgcctcagcctcccgagcagttggcattacaggcacctgccaccatgcctggctaatttttgtatttttagtagaggcggggtttcaccatcttggccagggtggtcttgaactcctgaccttttgatccacctgcctcggcctcccaaagtgctgggatcataggtgtgagccactgcgccctgccgggataggcatgttttttcacacggtgaagaagaaatctttttagccacttgtgcaaaatcagtgagatgatcccacctcgacagtgtggagggagcaggctgaaccctacgcatacatacatgagtctgtttttaatgcaaacttgatttttgctgccttagcgaaagattcgtatctcttcatctctaggaacgatattcagatgcctgaacttaacactgggttacacatcattcttggtggttttggttttgcgtttttgttttttgttttgttttctgtttttgctggagacagagtcttgctctgtcacccaggctggagtgcagtgacgtgatctcggctcaccgcaacctccgcctcccaggttcaagcgattctcctgcctcagcctcctgagtagctgggattacaagctcccgccgtcacgcccggctaatttttgtatttttagtagagacagggtttcaccattttggtcaggctggcctcgaactcctgaccttgtgatccgcccacctcggcctcccaaagtgctgagattacagccatgagccactgtgccctgctaaagttttgtatttttagcagagacagggtttcaccatgttggccaggctggtctcaaagtcttgacctcaagtgatccaccctccttggcctcccaaaatgctgggattacaggcgtgagccactgtgcctggctgctttgcactctttacctggcacatttgcatgatttttgagccatgtgaatgttacacagctcaagaaatcataacaatattgaatgtctttagacaaaaggcagcttaagcctagaaggtctccaagatgaacatcgattctgtggccagagatgctttttccaggcagaacacagccgcccagagacctcagaattagggtcattctcccagccccgaggaagcaggacattgttggggaatttacattttaagggggaactccgacccagggagtcctgttctgaggcacacgctgtaggtagttaactcaatcaggcattgcaaagttgggggtgtcactcctcagggctgggctaggggcttggccatgtctgttctgggcccctgtgctgcttccggtgggcattcagcaccctgtcctggagctgcaggggcctaaggcaccacgcccgtatcagtgcctgtggacaggtccggggaataaggttccatggaggctgtgaggaatgataactctgtggtcataccggccaccacagggtgaggaactgctagggaaggggtcttgccagctggaggagggaggagaagtcgtgactgcaattgttttataataatattaaagccaggagcaaccaggcatggctgtgccagccaggtcattaccaccgtgagcccccagagccctcctggcaccccgtgaggtgtcctgccatatccttgcaccatgtagtccagcaaactgaggctgggagaggctgcatggctcatccacggtcacacagtgaatgattggcagagcgggattccagcccagaggtgcacccccaaaggtgtgtccttcctttgaggggcccgctagcttctattggagaggatgcttctgcgcagtgggccctggggtccgtggttccgagcaacggggacctggcgaggggatgctctccctttgctcacagatcggcatgggtgtttgcttctccctggaagagtaggcacccatggggctccagcccgactctctcgtcactttctcgctggggacccctcttggagcttcacggcctcgtcctcatccttgtcttgtatgcttcctgacaggcctgcggcgagggtctggcatgggaagcgttgcagggatgcagcagggtccctggatgtgcctagcagtgtagccgctgtggtcacgctctcctcaccgtcagagtgcggggcggccaggagccccgaagcctcagactgagcttccattgtgtgtgcacggctgactccctactctcactgtgcaagggtcggggaaacgggaggcctgtgggaagagctggccctctccctactctcactacacaggggtgtgggggaaggggaggcgtgggggaaggggaggccggggggaagagctggccgccgtctctaggctgccctcggtcagtcagtgactgggaaggaacaggagtctagcagggacacccttgccagagacctgaggccagcagggccacatccaggaagtctcagaactcccggtccccattgtggggaagacagcccgtccactggaggcagggcagcggctgcgacagccactctgggggcctaagttcagggtcctgcagacacctgggcctagaggtggcggcgtcatggacagggcagggcgtgtgtccctgtctgtgtggcggtgatgcctggggcctgatgtgaggatgcccttgaggtctgatctccgtgtaattgtcctcccacctcccagatggcgggctggggaggggtttgttaaacgcgtggatgagtgacaaggcgcaggagctgggaggatgcctgtgagctcggtcgttcatgaaccagagacctgagagcaggaagagctgagagagggaggggttcacccggaacagaggctgagggcagggggcaagcagcgtggggtcgcccggcagctcctccccacagagggtgagccaccagtgcagaggccactccacgaagaggcagcactgatgagaccggagcgcggctctgttccccccgtgcgtcctcccttgtttaactccagcagttgattttttttggaagccacagcgccccgtcatttctggttttaatcagcgcaggagctcagccgctggaccacacgttgtctgtgagccaggcagggtgcggactggagctgcagagttaacaaggttcctccagatgccagcgggggaggcctggggcggccagtggagaggagtgatcgttaataaggaacgtctggtcaaccccaagcccctcccagcggaggaactgagcaagccaggagccctccctcaactgggcagcacagggggattctgtaagcagagctgccctggcggagctgctcgggaggggtggggccaaagaaggggccggatggacgttgctggggtccctggagggagctggggggtcagaggtgcaggcagacagggaagacaaaggagggaaggaggagtggccgctgtggagctgctgtcctgcctgggcaggccatgctgtcatttgcaagaattaaacgacttcctaagagagcgacggggagagccagactgcaggagggagggagaggcagagactgagaagccacagccctctggggagcagggagggactgggtccctgtggcatgctcgcctcgtgcccgcatcctaaggaaagatgaacccgtgttcacaccttgttctggtgaaggatggagcaggaaacaagcttcacagggaaatccacgtggggccccaccattcatcacagccatgagaccaccctttcagtgcacaggcagtgacctccagagacggggaagagacagatggccttccaggggtcagcacagggtgtgggcacagggcttccctgtgccgtgggtgactggctcagcagctgtctcccatgtcacctgcctgcagggtaccagattgcctaccgcctggccagcagcagcccccacaccttcaccaccgtggaggtcggcgccacagtgaggcagttcacagccaccgacctggccccggagtccgcatacatcttcaggctgtccgccaagacgaggcagggctggggggagccactggaggccaccgtcatcaccaccgagaagagaggtaagaccttgggggacccgggggtactgcagatgttgtgggcgcagcttcctcaatcaggccctctggggtctgcggggtacctgggaggcttcggccttcccttcggagaaagagaagggatgtgagcatttacgaagcacccattgcacccgacatggagctggacacactatcaaacagcattgcattcacaccttcagcctcacacctgctctctcagacacgtgagcactgcgttcacaccttcagcctcacacctgctctctccgacacgtgagcattgcattcacaccttctgcctcacacctgctctctcagacatgtgagcatttcgtgacacactttcagcctcacacctgctctctcagacatgtgagcattgcatgacacactttcagcctcacagctgctctctcagacatgtgagcattgcattcacaccttctgcctcacacctgctctctcagacatgtgagcatttcgtgacacactttcagcctcacacctgctctcagacatgtgagcattgcataacacactttcagcctcacacctgctctctcagacacctgagcattgcattcacaccttcagcctcacacctgctctcttagatatgtgagacggtctcaggtttaaggaaagcaacattgctcgcagaggctgagtacctggggcaaggctgcagagtcaccacatttgaggttgagctccccgaaagcagcccccagtctctgatgttaaacccacgtcctccgtagagcaggtgctcagtaagtaagttttccaaataactgccttcccaatgagaactgccgggcgagcagggctctgctccacgcacggagacaggtgctccatgcactgcacttggcctatccttcctgcagcccacggagcagcatggcattagctctgatttttaccaaagatgagacagaggaaactgagagagttttattaatttgcccagacacacaactgcagagctgagatttggactcccctctgacaccacgaggccaactcttcccatgaaagtctatagtgggcgcccttctcagtgggctccgcgcatgtcctcgggccttgcagcgcccagggttggtgccacaggaccctcacctcagcagccccagctcccactccaggtcctgatgtcatggccagacccagggaccctgtgggaatgaggacgggagggagcttgcaggcaccactgcagggatacttggagcacacagttctggccacgctcctatttttgtttttttatttttgaaacaagtcttgctctgttgcccaggctggagtgcagttatgtgatcataggtcaccgcagcctggaatgcctgggctcaagcaatgctcccacctcagcctccccagtagcggggactacaggcacacaccacccagctaattatgttctgaagagacagagtcttgctatgatacccatcttggccgcccaaagtgctggggttacaggcatgagccactgtgcccagctaatattttaatttttgtagagatgggggtcttactacgttgcccaggctggtctccagctcctgggctcaagcgatcctcctgcctcagcctcccaaagctctgggattgcaggtgtgagcccctgcctttggtcctcccatagcattcagtgaaagcacatcccctctgtgaccattaccactatcattattattgttattagctggagggacggaagccctcagtcgccacagacacccgaggtgcttctgcaatgtaaagcacatggaagggatgccctgtgaaaggagcgcccctatccccctgctgccaccctgggtatcagcactcagggctgtcggcttctcaggaagatggtaatggctcccaagcaaacgttttgacttctttctctaatgtatttgtgtggttttatggttcatttatcttaaacattgactgtgcccctcccgcgagccaggcacgtgtgcaggtgcatcacagacacggtctcacagcaggtcctcttatttccccgtgtcctgccccacagccccgccccacagtcccgccccacactatgccacctgattatccggaccagagatttcggagattttccattggggcccccatcctccatcctcgtggctcagggagagggaatccaagagacttgctagttaccactaagtccaagagagcctttgaaacgggatacgctgggccacctcccctccggagaccaggtgaaatcacaacggccagaacgtgtgcttacggaggcaagtgctgatgaagtgagacgggagccctcctcccacacccgccactgggggccgacaatcaattgcagctttacacacgccacgcattctaatcagaatcaataatcttcatgataaacaattaaacaattattcctcccgccgcggaacttctctgctgaaatcgatggggtgcagaggcacagcggcggcagatgatgggcactccaggccgggcctggccccaggcaccccgcgtcccgcatccaagctactgcacacaccagaggcagtgacagcccagaggtgccctcacctacagcagcactgagtagatgccgtagatgctttaggccctgggtgactgcaagaaggaggaaattcagcgttaaaggtggactgagcacaacatcagaaaaagagagaccaaagggaccacagggcttggaacagcccccaagaccctgcgaccccagctgtcatcacagacacagtgcctggtggtctggcagcccagggactcctgtgtggctttgttcctgtctgttggtctctatgagtagtgcatccgaagtcagccttaagatagctgctcagctgggtgtagtggctcacgcctgtaatcccagctctttgggaggccgaggcaggcggatcacgaggtcaagagatcaggaccatcctggccaacatggtgaaaccctgtctctactaaaaatacaaaaattagctgggcgtggtggtgcacacctgtagtcccagctactcaggaagctgaggcaggagaatcccttgaacccaggagacagaggttgtagtgagctgagatcacgccactgcactccaacctggtgacagagtgagactctgtctcaaaaacaaaacaaaacaaaacaaaacaaaaaaacagagcctctcatctccctgacccaaggaagggactggcttcagactgtccaaggcatgcaggcagctctcatgggcaagcagtcagccctgtacagcagcgtagcctcctggggatgttccttgggaagggcagcctctcacatgtccctggtctgtcctcatttggttgcagagcggccggcaccccccagagagctcctggtgccccaggcagaagtgaccgcacgcagcctccggctccagtgggtcccgggcagcgacggggcctcccccatccggtacttcaccatgcaggtgcgagagctgcctcggggtgagtggcagacctactcctcgtccatcagccatgaggccacagcatgcgtcgttgacaggtactgagagagcaggagcacctccccagggaacggggccctggccgcctccagccagctcctgtccagatagtggggaggctgtgtgggccaagcaggtgcacccctgagagcacaggccccctttctttttgacactccccatgctgggaatcccagaactcctgggtcctggagctacttccaagggcccacccccagccgcttcccggagtctgctcttccaggtgtgcagggctggtttggtcaccccaggacccagggattggcgaggcaggggtgatggggggcaggctggacatgtgggctggagtcctagcccctcccaaggctggcaatggggaggggaccatgtggaggagggctgggctggcctcgggtgtccagggctggagggacgttgcgtccccttgcgttctcgaaagcagcagggagatggatggcaccacgagtactgtgcttccttagtgatggctggggaagatgggagggcatgcctaggacacgactagaatccgtccactcactcagttgtttactggacctctgggctcagcatgggagagggttgcattgacaatagcagcggcgttctgtgggtcccccagggtcctcacaactgcggtttacagacccacccactctttacagacaaggaaactgccacagtcacacagatgggcatcccagggcttagaagccaccccaggagtccacaccctcaccacatgccctgaccaggccctcctggggcctgtctggttcgcaggccctgcctgggcagggccacccgggacacccgccttgtgcttctcatcggcccagagtttggtcacttgttactgagctcacactccaggctgtggagcgggggtcttggagtgagtccctccatgtcgcagggctctggagcctgcaccaatgactaagagggtagaggggccaagacggttgtctccaggctggccgagcttcctctgtctctcagatggtcacataggtcagctctgcgtccctgcagtcacccagtaaggggagaccatgatcccactctacagaggaaggccaaggtcagaaaagtcggtcatttgctcatatcccccacccagcctccgtggcgcccagccatcctcgtcttcgaggctgcccgtctcagcccttcctgactgaacctgaatgtagggagggaggcaggtcccaggtgaagcccctggcagctcctcagaacaccaccctggccccactctgccctgggggcaaagttcaggctttggagtgagggctgattggagtgtgggtgtaactggtcctagatgtgacaacagggggtttcaaagagaagagaaacctccaaaacccccatccctggcttgaggaccaggcccatgacagaggcgaagcacttgcccggggaggggtggccgaccgggcgtctcagtacagagctgtgaagctggaactgtgcaggctcagcctggcttctgccacttgccgttgagtgatctggggcaagtgacgggctctcaggtgtctccagctccctggcctttgagttgcgaggcttggaggtgataaggccctttggacggtcatggccatggatgccagtatcgcctttgccaccccacacagtgtccccaggaggcacagctgggtgtcaaatgcaaatcctgaccagagtccctgagcagtccaaggagggtcacacggaccatcgggaacccatgctgcggctcccaggcccccattggagaccacagaccagcaaggaagccagcgccccagtgcacagctccagctctctgtggccccagaggacccaccctggcacagtcaccctctgcagtctcatggtccaagcagccctctgctcttctgaaaatcgaggtggaatggtccctgcgcacagggcttgtttccagcaaggccagagccattgcctggcttcccctcttacagggcacaacatctggtgaggtccgtatgctggcgggttggaatttagaaaagctgttccgtccccacaactgtggttatgcccctcatgttaggaaaacgaggctgcagcagctccggcttgatgtcccctctgaggtgttttccctggtgatctagtcactcagcttccagacagttaaagctctgacaggacttcaccaccaccaccgccatcctcgtcgccatcattatttccggaatcccctcatcctgtctagcacctgtcattttcaacaccacttccatgtgtcatttcatacgatctttgtaacaaccatgtggacatgcagcccagacttctcactattcccagtttacacacgcagacattgaggcagagatatcttaagtaacgcatatgcaggtgccttgacgtctctaaatggaagggatatttcctgaggtttttgtagttgtcacattccgtgagccagaggtcaaggctccatagacacagtccacgtcctacagttaatttacaagggtctgcgacgtatgaaaacccagtgtgtgtgcatctgaacaccaaactttccacagtcagtctccccttagtagctgcgtggccttggaaaagtccaacccttggctgcctgctaggactctgtcctctcatctgtgaaaggcagggctggagcggggatcctgctgttccctccagctctgtgagtccaaggtttgcctcattgctgaccgccacggaactggcagccaagacataaggcaatcggaagagtcagactgtccgccaggttcctgccagcatctcacttgcccgttgagctacagcaacagaactcgaggggcacagctctctcccctccagaggaaggcactcctagtggcagataccatcctcccagagccctggaattctcctggcacagccccgagggtcaggggagtatggccaggtgcgcccagcctgacttaataaagtacacaggatgcttagcttaattggcagtgtgctcacatatataaataacctcaccctttgtgtaaccatctaaaagaaggaaaaaaaatatccagccactattcctgaaggcttctgaagccaaacagactaatcgtgtgtccgggacttcatgctggcaaggagaggtccatgtttcaggacagacagtttaatttggtataggagagaccaatgtcaatttcctaatgggccagaactaggacaaatgcttcctctgcctatcaatagagaacatgtcacaggagaatcccaggaaagtgatattttgtacactgccacagtataatctcccttcctgtttaataatcctgacagctacattttactttcaccagttgtgtgacatctgtgagtatccagaaaacattaagagtttaaatgtctcaatttggtgactgtgactacgtccagggaatatgggtcgagacccccagggagaggggttgggtctgagacgtgttcaggtgttgccagtgtctggttggtggttgaagttgtgagacggggtagccacccacagaaatgcagtagagaggaagaagagaagggctctgagcccagtgtgacttggaggttctggatgtcactttaggacagagcagtggctgtgcgggctcagggggtggctgtgcatctggctgtgatgggctcagctcctcctctgagctctgtcgtgggataggtgcgggggttccaaacagaagacagaaaggcgcagagggaatgagcatggaaaacagcagggattcaacgaatgtcagcaccacggccctagctccttttgactgatttcttttttttttttttctttttccgtataatgtaattttttaaaaatatcattatttaaggatcagatgggctgggcatggtggctcatgcctgtaatcccagcactttgggaggccgaggcgggtggatcacctgaggtcaggagatcgagcccatcctggccgatagggtgaaaccctgtctctactaaaaatacaaaaattagccaggcatggtggcatgtgcctgtaatcccagctactcaggaggttgaggcaggagaattgcttgaacctgagcggcggagattgcagtgagctgagatcataccactgaactccagcctgggcaacagagtgagactccatctcagaagaaaaaaagaatcagatgaacttggccaaggatatgatacatgagcttgatattctttgtgatacaatagtgaggtctaagtgtttgtgtttgtttggttggttgttttatttgtttttgtctgtcacctgggctggagtgcagtagctccgtcatcgttcactgcagcctccaactcctgggctcaagataccatcctgtctcagcctcccgggtagctaagactacaggcatatgctatcgtgcctggctaatgtttaattttttttttttagaaatggggtctcactatgttgcccaagctggtctcaaactcctggcctcaagtgatcctctcacctcagcctcccacagtactgggattacaggcatgagctaacatgcccggccaatagtgaattcttaagaaacatttttagtgccttccagataagtaaataaagacagcagtgaatcgctttaaaaagatgctcagcactcatccattttataatagaaccaaaatgaaggaatggagctcctcctatttaaaagactctgcatttagctctgaggcaggaacgtggaacttaagctatgtccttccccgacgcccattccagaacactttggctgtggaggtcaagtttgtgtatgtgattagccgtccgaggcagtacgagtacaaactggctttctaaatatatcggttattgatttggggtaagcaagagttctgatagcaagttcagagagtgagggtcctgtattacccaaattatttatttcctgagtttgggatgattagaagaaagagattagatggcagatgttatctcaaaaatatccctaaatctatccagcttctgagtttgtatgtggagatttgggaggtgaggcatggggaatgagcaaaggcccggggagtcaccaggcagcatcagtggcttcctggggacaagtgagggctccggggtgggggagccagagaaagctttcgggaagacaagaaagagcacatcacatttattcattgcctgctgtgtgccacgatccacccgactccatgaggatgcgtgatgggatgtcattttcacgacagccctggaagccccggtgctgctatctccatgtccatagccgaatacagcaaggctctgagacactgacttgctccagtgagtagtggcagagccagcattggaattctgcttagcccactccaaagcagaggtttgggctggcttggaagtgtgaacagagtgcagaattgggaggagttagaagggttacaggagggtgttcttgcatcctgtgtgcatttgtccctttatcatggagtcaccaaaatccatgctctgccacaggagggagcatggcaggagcaacgggggtggggggcttgaggatcaaacatttggtctaggaggtagaccagtcatccacaggagcagcgctgcagggaggtgaggcaggttggggtgagtgcacagaggatgctaccgtctctagtactgcagagccaggagaggggttgatagcactgccctctgcctgcctcatttgggcagtggggctgctgctcccatcggctgcctgctggagctgctttctgcctggttttgggggcactggcgtggcttccaccgagagggttaactcccccagatccgcattttgtgttccctgcagctcacagagacacttaatcaatccttgttgaatgaagtgagtccggcaaaacacaggcctcacgctaagaaccctgctctctgtcctcctttgcacccaaacccatttgtctgggagccaggctgatttgtccagccacctgacacgcacttatggcacaccacgtgtgcccggctcagtgccagacccaggcaggacagtggagaaagaggggtttcaaggagcttgcagtgtggctccaaacccccaaatcatagcaaagtgtgaagtactaaacagtggagtgctgagtataattacagttcaatgccagaggccagtgagaaaacaaatacatcaataagtaagcataatcgcaaataaataaataagtaaacaaatcatttctgcaacacctactgtgtgccagatacaacactggtatttacgtgtcctcataggcaacccccgaccccagcctgagaaacttcgcagatggggaatagcatccttattcagtccttccacccatagatctgagcacctcctgggtgttcttggctcttgggatacagcaggaaaggaggccgactcggtccctgtccttgtggatgttgagtcttgtaaagacagatagtcgtcaaggaaatgtcacccatcatgatgcagaagatgaagggaaggaacagggcacgggggacagcaggcagggccatctgagcagatacttgcagatccataggaacagctgatccttagtgagcttgccccacaccacacacctgactctgctgagtgtctcacctgagtttaagcctcacctcagtttcacgatgcctgtgctattagcccaggtaaggaaactgaggcaaagtatgctgtccaaggttaactgggaggtagaagccaggcagtttgactttggggtccacattcctgatgcccactctgctgcctcctggtacaggagccagtggggctatggtgggtggcgcagggggaggaggcagggaggtcgtgggagaagacacatggttatcacccagatgaggcaaagtaactcctaggatgccaggaacagaggggaaattgtttgttttaacttagcaaaggctgtctaccagaactctggagcaaaggtcatttttatggtcggacttcagaagcatctccgttaaagctgggaccaaggccagctgtctcctgtggctgtttttccagttgtggacgctgagtgcagagggtctgagatgtgcctgcggtcagggactgggaagtaccaagaccagaccaggttctggagggctgcagtggaaaagcaggccttgaggtgtgagctggtagagaaacagtgtcacctggtcttaagcaggacggggacctgaaagcaggaatagaatctaatcatggtttccaaaaatggttatcagttttctaaaaagcagaatccttcctttaaaccaagtatgacccaggccgaatgcataaacctgatgggcatggagctcttgttggctgatgggggctgtgtgggcctctggacttcagaggcttcagagtcctgggggtccacagggctccatttgaaagccactggtttacagattccattgggagtgaggacagaagactggttttcaggtgatgagggcttcggtttagagtgatagttgagacttttagacatgggtaacagaggttaagagtcctgaggcaccccgagttttctggtctggaaactgaggaggatggagccctcatctatgaagagccgctgcccgccagggaggagaacagagcagtttcctcacttgctcattcggaagtcaaatgaagggtatctgagaggaaccagccagtgactgggttgcagggcgggtccctgaccggctggggcttcaccaagatcccagcattgtctgcacggaagagtttggctgaagtcttagtctcaggcatggcatggggcttggcacaggagacccattgcatgtggagtagctggacggacggacggaaggaaggaaggaagaatgaaggaggggaaggaagaaagggaagggaaaaggaaggagggacgggaggtggaagggagagaagggaagaaggaaggaaagtgggaagggaggaagaagggagagaaggaatgaggggagggagggaggaatgaagaaaaggagggaaggaaggcaagagaaaaggagggaagggaggtggaagggagagaaggaaggagggaaggaagggaggaagaggggagagaaggcagcaaggagcggggagggagggaggaaggaaggtgggtgggcagatggaagcgggcccgaagtgctaacagcagaaggcacctcagggaaacatgagtcccgttaaaatctccgtcgacgggctgggggtatttttcacttggatgcttgacagggatgtggtcttccgtaaagtgacatgtgaatattgccatttactagtcttgtagcagtgggcctcagttttatcatccttgaaatgggaataatgatgcctcctctgccagagctcgtgtgagttcaaaggggttgcacttgccaagcgcctggcaccgtgtcagccccagtgaatggtaggggtgcggggctggcgggtctctgcctgcagccggccaggaagtggaccttagagaatgctgcaaggctgggtctggcccagtaaagagctccaggaggacggagcgtgagaatcaggcaggaactcattttatacttcggatcagcacaagggcccggggaattagctcttcctgaggacttctctggatcccttggagagcagtgatgtgccgactagagtgcaggggtggctccagtgaggggttggcactgcctccccgaggagccctgagcagaatcttccccctggccaggacgccctgcactccctgccctctgtgcagctcctttctccctgaggatttcaaccgtccaggtgttcaaaggcttctcccaggacaggtccagggtctccttcaagcccctgctcattgcacctaggaagtgattgggtccgacccaagaacagcctccttgctaagctgtctcgggcccacacaggagcccagagctctcagggcaggggagggatttgcccctcttcccagggcttcaccaggaatgcctgagggcaggacagggtggcagggccccggcagtcacggtctcttccacattgcagactgaggcccttcacctcctacaagctgcgcctgaaagccaccaacgacattggggacagtgacttcagttcagagacagaggcggtgaccacgctgcaggatggtgagcaacccggggcccagaccgcgttcctggccgctgcccctggagcccgagatacttaggccacactttcgtcttgagccagaaaggggccaccagggagtggtggaaagcagtagaattccattagtgacagacagctcggagggtttccgcacagcctgtggtcataaatcaaggtttcaagggcttccaaatggaatggaagtttctttgattggcttctaaagcccctactatccattagcatcccagaaattgaataattgatagggtcattaaaaataaatgtcagcgggtagctgggttttaagagattttccccatttttctcattcacgagccactctttgacaacagcgcaggtaagtgatgggaagcgaggtctcctcagagctccaggtggcgttttcagccgctccgtcctacctcggcggcgtcaggcctgaagatggattgttattctgtgtggcccaggcctgtggcgagcccaggaggcagctctatcagccgcgtccagcggtgatcacaggacgggtgggatggaaaagagtggatggtgggtaatagctcagctcccaggctggaaacccagtacttagttcacccagcagcgtttcatcatcattcccgcaacctatccccaaagcactgtcttttccatttaacgctccagtggaagaattttccaataaaccaatttccagctggctcaccctgtgacctcacatctccacttctgctctctcgatgacctggaagtgtggtttctcccacataggcctcccttggcctcagggaccagcagagggtttgagcaaaccattcccggcttctcagcaactcacagaggctgttttgctgcaaaccctgcactcccagcagagcagaacctgcaagagcctccgacaggccccagctgtgctcccaggaaaagcacacttgcccctggaaaagcactggctggcttctgtggctcctgcctctcatccagctcttttctgagcacaaatcctgggagtttattggagctttggggaaagccagtgagaaagagaggagccgtcccgggtatatggggtggtccagggccctagtgagccctgctgggccctgaggagccgggctgagccccaggagctcactgtccaagggtcccacatcgttagattcaaccaactgtggattgaaatgttcagaaaaaaagttaaaaatacaaattaaagatatacagtgtaacaactgtgtatttgtttggagagtgttatgaccttgtacaatttctagattactcatgagagctcctacaattataacattgtaacattgttatgtaacagtattacaaattataacgttgtaggaggactgatgagtaacctagaaatgatttaaagtatgcgggaggatgtgtgcaggttacacctagaaatgatttaaagtattcaggaggatgtgtgcaggttacatgcaaatactgcaccactttattgttagcaaacctggaggcaaaagctacttgtaactggaaaagcctttccggttaatctacttaaagtggggaccaatttcacactaaaccacaagggaaaggctttgcaggaactaaattacaaaacaaaaactatataaatgcattcattttaacgttacctttaacacagttgaggtaatgtttgcaactaagcactaaatcttagaataaagaacaaaaccccacacaagctgatgtcattgtcgtaatctctctgacagattgtgtgaaagcaaagtgcaacagcctcctttgacctccagggcagcatccaaaaggaccatttttgaaaaaaatattgaagggcctcttcagactccagaggcctttcttaccctttgatattcagattgggctttgatgcacctatcttgtcatcgccttccctgggatgtgcagtttctctttgcaatggagttgcattgtatttgtgttgtattgtcttacactatctagagattgacaggcacagactctctccaggggttggggaaccctcggcaagatagggagagtcctctgagtatgtggacggtttactgatgaacagtttctttttatagtgatttctatttccctgcacaacctcacaactcaaggacattgagaactccctgtaatggcaccgctgtatcaccagggctgtcaggaagctggctagagggcccaccattaagctggaaccacaggaggttaagggggttggagggagacccatccctaaaacagaacggggaaggtggaggtgtgactgatgcaggcactgccagggctgaggagggggtgtctggcaggtccagaggaaaatcacagagccggtgaccccgggacccaatcttgggttctaagtggagaggcatctgctagatgcacaagtgtgcctgtgggaagaacatcgtcattccgttcagtgaatatggactggatacagaatgcgtgtcacacttctgctgggcccccgggatcttacagctgggaggcataagagttcagctcaatatgccaagacaggaccacacagatttggagggagcagaggaggcagggaagaggggcacagaagacctcttggatgtggcagatgacaagaagtttagtttggctagagtgcagggcatggccataggcagaggtcaaaccagccttgtccctccagagagcagagcagaaccatggcagactccccttcacttcaccctgctgtcccagccagctgcaacctcaccagaaatcaatctcctttcctgacagccttttagtgtttcaaaccaagtgacctggcatgatcatgtgtcctattcaggaaaagtagctctcacctaggtatcttaaaaaaaagggaaaaagataagttcccctgctctcccagaagacctgagccctgcagggagggtctcgagccagagagctccaggacagcctcactggaggggtggctctcggaatgtccaccacagggagagcccagtctgggtctgtttctcggggccattgttaaggttggctccctcctatcccgaggacaggctttgaaggagaagctctgggaagccccgaggaagggcaggagaaggggacccctggagaaggaaggaggcagggctcaccagcctccccatactcactgagggtggccctgggaagggcggcagaacataacaaccaccctgacccccgctttcctctcctgtgtgtttcagttccaggagagcccccgggatctgtctcagcgacgccacacaccacgtcctctgtcctgatacagtggcaggtaagagcgcggggaatcacgcgcgttttgtcaaatgtgttctcatttccctgcgcattcagccacaacggctgacatggactgcaagctgagccctgagctaagcgtttgagagtagaaccaaggagacacaccctcagactcaaaaacgcgagggggaaatggtgtcaattatcatctcggtgtaatttccaaaacattagaagcaggactgtgatgcacgtagagaatgaacttgactccccttattcaggagggaccggcaggatggggaggccagtctgagagcgttggaggaactgggtatgtcttggcatttcaccgaggacgttggagcaaggcttctgtgtaaacacaaattggttatcgccctacaaggcagtaaaactgcaaccgctggagttagcttttctagagaagtcatctgcaaccagacaaaatatctaccggattgtacatattttcccaaagtctgggggtgggtggtggtggtggtggtggttgttgttgttgttgttattattattattattattattattattattattattattattattttgggacagagtctcactctgtcaccaggctggagtgcagtggcacaatctaggctccctgcaacctctgcctcccgtgttcaagcgattctcctgcctcagcctcccaagtagctgggattacaggcgcatgcccctacacccaactaacttttgtatttttagtagagatggggtttcaccatgttgaccaggctgatcttgaactcctgacctcaggtgatccacccacctcagcctcccaaagtgctgggattacagacatgagccactgtgcccagccaagtctaggcctttaatctccaatgtgcagtgagttaaatgaaggcatattcttccagataatcacacactccttgttgggcctgctcagcaatgctccagtaaggcattgaaggacacgctgccgtctctttcccttagtttcaattttgggcaatgcttactgacaagtacattgatgacaaatataacagagggacaaaactgcccaaggaagggctgcaggccccagggagatcccagctgaagagtggggcggggagctgtgcggaggactcagcccagggcctgtgtagcccggatccggggcagacagatgttgagtttccccagggctagagcttggcctggcagcagacacaacagatggacaggcagggggccaagcacgagggcagagtcaaagtttctggcccacagggaggttcctgaggccagaatgggggctgctgtgccagggagctgggaacatagtgggatggggccagcatggggtgggtacggcatgaggacaggtcagcctgggagtgcctgctgggagctggggtcaggagggcagtctggtgggcacgagattcttccttggggctgaagctgtcctcaaggacaatggcagggtgcccgatgcagcaggtgggaatgatggttcgggaagtcaggagaaaatcaagaggggaacagtggtctagacatggccttggagggcgaggggatgtcccggccacatgccctccgccggtgcaggggaggcaggaaggggtcctgtggaaagtgggggctgcgggaaatggaagggatgctgggaaacacagccaaggccaccagtaggtgtcccagacagagcatctcccagggccctgcagaagggccactccaagggacagtggcttcactttgcagcacggaggatgaggtccaggaccaggctaggacaggaggtgccagagatgcctgctgggccgggagagagacgtgctgagtgagcagcgccagccgcagccttcctgggcatggtcttgaggtgcgtagtgctagagatgccagagaggaacccggtgagcagagccaggctgggctgtgggtggggccagccagggggagcttgggaggggctccgctttcaccctcttgctgtatgatcctatgaaatatgaccatgtttgaggtatgaaagtggcaatttatgtgattcaacctgatatcacttgctactgccacttatctgagggatggagagtaggcgtttaacaagctgggttctgtgaagagtgtgtcatctccttcaagtgtccatggaggtgtgcggggctgcgtctcggctgcctttctcttgctaagggatccagcttctctgggtaggataggaacctttccaggcaatgaaagaatgtcccagtgtctcctggtggaactggaagagcacttctgtggcactcagccctactgagtttaccagagcataggggggccagagtgggaaccacgaaaacagcctgggccccacctctgcccctgggaagccacagcccctgatctgtctgggagccactggaaaagtgacgaaggacccacccgcaacttgccatcgggtgactgtggccctgagaggcccctctgactccaggttcctcctttgtaagaacagaaggtcacaaaggtgagctcaggtctcacacaacatctccagtctttgggggccgctagacccccagacccgagcttcagccctgactcccgtgagggtctccggtgggaggttagagacattcaaaatggaaatgcaaagtcccaagtgctcgtttcccagcctgcaccaacacagtcaatcacaagaacattggcactttgtaccatgctgaatcctaccagaaaattcacattttctttgtagacgtggcggcagcctgccaataccttacctaggtaagctcctttcctataaaggcagtgagcatcagggctgggatgcgtcacctcctccaaacaatggttgtgaaggcatcacttgctgtcagccccagtggacggtgcagggctcgagctccccttggtgctgctggacagctcagggacgtgcctagtgccacctggaggagctgggctggtgtgtgcatcagccgtccccctccagagcccaacagaacaaactaattgcaagaagaccagagcaggaggtggtcaatacaacgtcctgtagaaataaatgcttgtcaactgccaggcaattgaagtataattaaaattatgagtaatttactgcattagaacaaacagaacaaagaaaaagaaactaggtttaaatatagatttgcattccaaataaaatgtttcacctgtaaaccttttgtgttttttgttttgttttgttttgtttttttagtaattactttaaaaatgcaaacacagggccagcactttgggaggctgaggcgggtggatcacctgaggtcaggagttcaagaccagcctggccaacatggtgaaattctgtctctactaaaaatacaaaaattagccgggcgtggtgatgggcgcctgtaatcccagctactcgggaggctcaggcaggagaactgcttaaacccgggaggtggaggttgcagtgagccaagatggcaccattgcactccagcctgggcaacaacagcaaaaccttgtctcaaaacaaacaaacaaacaaacacgggctgtaatttcaaggcttatagacccatttaaatgcctcccttagtagactgtcaggcttgattattcttagtaggacagtcaatccttgcctttcatgggatccagttctgtttgaaagctaaggagtagaactccttctgtcttccagggtggagtgcagtggtacgatctcggctcactgcaacctctgcctcccgagttcaggtgattcttctgcctcagccttctaagtagctgggattacaggcctgcaccaccatacctggctaatttttgtattttcagtagagacaggatttcatcatgttggccaggctggtctcaaacccctgacctcaggtgatccacccaccttggtctcccaaagtgctgggattacaggaatgagccaccatgcccagccttgtgttttcttttaaagacagggtctttccctgtcacccaggttggagtgcagtggcgcaatcatagctcattgtagcctccaactcctgggctcaagcaatcctcccacctcagcctccccagtgtctaggactacaggtgtgcaccacgatgcttggctacttcttcaaaaaatttcatagagatggagtctcactgtatttcccaggctggtcttaaactcctggactcaagcgatcctccttccttgacctcccaaagtgctgggattacaggtatgagccactgcccagcctgtaagtgggttttgagactgttttctagcaaagaaaaaaatcccaagcaattgatcacaccatacgggaggctctcagtgtaaaaggcaccttcccagaggagggttacatctgcctgggcaaaggcagggaggcatcccgccgcttcagaacacatcttggggctgtttctttttctcttcacttgtgccacccacagaggaccaacacctgcatggagtgctgagttccagaggggactgaggcaggccacagaatgtgaagagctttcattaagcgcagtgggctctttaaggcattgataggaagacagcagaaggaacgaaactaactctggccagaggggcacctgaatgcacttggcaggactgccaggcccctgcagtgaaaggctggagaagcgcgtggcccccggcacagcctgaggaaaggctcacgggtgacgtcactggtgtttgatgttgtgtctcacgggtattgcgtgttgagcctcctgtgctctcagaaccatcaggaccaaactccggagagaatccctgttctactctccacaaagcagaaggcacaggatggaaagtgaaagctcagatggtttcactgagcttccggcccgggggaccacggtggccggatcagatttggatttgggcacctgctctgcctgaactcgcaggagacagtggcacgtggttgagcctccctcagcccagctccctgtctctagaactaggagagttcggccctgccctgctgctcccctacctcagcagagagagctgggtgggaggttccacagaggccagcaacggcagagggtccgaggtcaccgttcaggcagctggaaggagagaggctttccctgcaggtcctgcctcctcctacccccaggccttccctccactcaactctgtggctccaaggtgcccaccctcctgggtcttccccagaccattgacttcttcctgcctcccctacctggtgataaaacccaggcacactcctaccaggtcatttgcatttaaacaggctcttttgctgtggcacgcctgtaatcccagcactttggtaggctgaggcgggcagatcacgaggtcgagattgagaccatcgtggccaacatggtgaaaccccgtctctaccaaaaatacaaaaattagccgggcgtggtggcgggcacctatagtcccagctactcaggctgaggtaggagaattgcttgaacccgagaggctacagtgagcaacccaggaggttgcagtgagccaagatcacaccactgcactccagcctggcgacagagcaagactccgtcttgaaaaaaacaaaaacaacaacagcaacaaaaaaacgggcttttgaaaaatgaagaacctccaggaggctgctggcgaatttctgaggcgtggcaggcacagggaaggtgttttgaggcaggactcccagttcccttcaagcttctctccacacagatggccaagccagggtgcagtgacacacagatgaggtcatgttgaactccggcaagtcccactccaccccagggctctgactgagcatccgccatggctgaggcctggcccaggtgctctgggcatttaaacatgaacaagacccgaacatggcctgcccctgggcatatgcagagtcagagacatgcgaagggctggggacacgggtctgtggtgcaaagcgaaccttttgtttccagtcatataatactctggaggccatctggccagacttctgcctgtcttgggcacagggttgagcctgggagtttgagcagtcagcccaagcttgtactgcaaggtggctgcaaggccacgacccaaatctagagcctgaccttgacctcatgggttccatggagccgccctgctgatgcctccgagcacctccggagttggagagcctctttcacagattacagacaggttaatcccaaagtccaggaatggaaaatatggttgaacccagttcagaaccctgtgcaggcaggcccgggcatctctgtgaagccaccggaccctttgtaagtgacgctcccactgggaagatgacacctgctagcagagtggcctctgccagctgctgccttcaaggaagccaccctctgggggcacggccgcctggaccccctccccaggcctggaagactcctgccaggagcggatgcattttgactcttcagtgatttctggtgcaaacagcatcagttagcctgttggccaaatgtggccccagcccggtggctgacggacactgtgtctgttgggcgaggcggattggccatttcttatagctctaaatcatctcattcgcctaggctagaaatatctgtgagtccaggatcagtaatcttcggccccttcccctccatcttccagccccagaggctgggaaaccacacttgggcccagggagaacatttttattttcccaacctcctaacttcctgcttagttgatagttttggtgaattgaatccagccttcgtcaccccacccgagcttccctcctcccccagaagtaaattgcactctctgtaatcctgtcttgtctgtgcatctgcagagctggctgaaggcctctgcagtcttccttctgaggtaccagttcctcgagctgccgcaggtctattctggggcgagagggaggctttgaaggtgacctcagggcgaggttgcttggctggtacttacagagcccctgctgtaagcttttgatctgtctgctcgcctcttcgtcatgctgatagtcagtccagagcccagaaatggaagctgaggtctctcatcttcactgcccagactccagccactctcaccccaccaccagtgtgaacagcaaggacaggactcccagcaggaccgcctgggaccatctgggtggaccaggagccttgggcaaaacaatccggctctctgggtgcgcaggcatgtgctgggtgagagccattagcggggacctgttgctgtgtggttgtcaggggcccaggagaggaaagtcagaagcccccagggtcttggaagtcactgccatctctcattcagcaaagggctcctgtcagtgcatttttgcaagactggttgttaccgggagtagcagtaacccaggaatccaccaagcccatccatggctccggtggattggaggaagctccgttctggccagtctccttctggggagcccacccaagtggggaatgacccggcacttgggctagtcctggctcaggcactgggaactgtacctgtagcctggctgctgctcctagacccacccagacctgcccctgcccttcatgcccctcgctcccgtctagtggggctacaccaggcactgtgcccgccttgcagagggccagcccttctcccctcatcaaaagccgcctcctcctccaagggcagctcaaacgccattccctgcagttatcctccagttcttcctggcagtgagctcgccgtctctgaggcttcagagccgccttcctcactcagtctctggcacccggtgcactatagctcaggagatctcctagatgcaatgagacggcaaggctggaatatattccccaaggggcggagctcagtgtttgcgtgcattcctccagtaacatgccctgagctcttggtgagtcagtgtgaggagacaggtgcagcttttcaaggagccacagcaccaggccttcctggtggctctggcactgccctccctccctgcgggagggcccctgggcacagagctctcctgcctcccttagagccacctctttgcagtggcccgagtcacacaggacagatgcgctgtattctttagggtcagcagaatgaccatggaaagcaaacggccatggagaacacttccttggggctcagtacagaaaccactctgtctcctctttctgaaatccagatggcctgcggagaattgcctctcttcagtctcacataccgacttttccaacttttccatccattgtatttcttctaagaaggttaagtaaaccttctatttcattgtggctaacagttgtgtttgaagaaggatgccttacagaataagggttttaatttcagtctcagctgtggcccatgagataaccagggctagagtttgaaagagcagactgcaggatcacctaagcccagtagttcgagaccagcctgggcaacatggtgagacgtcatctctacagaaaatttaaaaattagcctggtgtggtggtgcaggtctgtagtcccagctactcgggaggctgaggcaggaggatcgcttgagcccaggaggtcgaggctgcagtgagctctgatcgcacccctgcactccagcctgggtgacagggtgagatcctgtctcaaaaaaaaagaacagaacagactacctggaacccccttgtgtggtgatgtgagtggatgtgcaagtgtgtgtgtgttatgcacacacaggatttccaccacgcccccacatctctggtggtgctttcatcacgacactgtcgggagccagattgcagttgcatataatactgaccggtgcccactcctagcacaagggactaatttttaaagactaagagtaaaacaactgaaaacctaaaagctgctctgaatgtgattctatagactccacagggaggaaaccgaacatgaaccccatcaacacccccagtttttaggagactgtctgacatgcccagccctaagggatggggtgcagagcaggactggcggcccggcatgggggagctggagaaagagcaaatgagcagcccaggacacctgtgagtgactgttgccggcgtcccaaacactgctttgtcgtcaaaatcatagaaaaggaaaagagcatttagtaaaatcagcaggcactgtagcctcccctacctgttcccctatccagcctcgactgtgcctgtaattctcactccttccttttctgccagctttcagcttcccaaactcatagctccctggtcaggtttggattttattgttttcctggcaagttgagtagtgctgggaactccttgagccggtgaaggggtgcctgctggagaaaggggtcagtggccacagggtgtggacggatggggtggccacgtgccccagggaccctgccgtgccttgctgatcgtctgccgccgcctcgggtacaccgcaccctggagagaccctcatctgtgctggctcactttctgctttgtttctctagctctattactggaggcgctttgaaaagcttttccatctgtagattgtcccgatggaaggcaagcagcgccggggagggagcgggtatccagagaaaacctgggatgcccagttacatctgaattccagaagaatcattttcagattctgatttagctgggtgtcttgtttttttatagctttaaaaaaagcaaaaaaatcaagagagcctcatttgacattgaagtcccgggctctggttcggcggttctggcctggtagctgagcatgctccagccccgtgaaggcggccagccagggccagagtagagaggctggagcagagccggcaccaaggtcccctcatccgctggtggtggccagtgaagggtaaagagagaaaaggaaaagccagcagaaaaaaagtccctcccagataatagcccaactccaccgtccatttgagaatttggagctagatgccgggcagtgccatttccccatctctggtctgtggtgggcagcgggagtcctcggacctggggctgcaagcccgcaggatggatacgtgacccttgtaactttctgcaaaattgaagagggctgtggggcattgacaagcacaccgtggggggaacacaggggactcagacgcgcccccacccccagacgacagctctctcagcccctgggtttgctcactggggtccgacacccctgggccaggagcggagctgtgtccaggctggagtagtgtctaagggtgtgggtttgcagggcctctcagacacggatcgcaaagacccggcaaggccactcagttgttcccgttatgcttttccgcgtctgaggggggattatatcccgtcgtgctgttcctgaattgggagcatcacaggggtgtcagaaagtcctcagagagggacagctgctggcagccctgcatggcagtggcctgggggctgcttgagctaatgtggtagcaggcctcattttggaaaacctcctgagtctgccgggtacacacggtgcccctctggcatgtgcgtgtcgcatgctgcatgcgtgagtgttgaacgcgtgagtgttgttcctcgttgctaccacagtgcaagcccccctcactatccaagccattctgtcggagagcctggggagcaaagaacaccgcttcctccacgtttgggttttgcctcgtgagtagcaagagtccaaagaaaaagcgatttctctaaacatccaacccctcctggtgcctgggttcagatagtgaggaccagagagagtttggattgcaaggatgtgttatttaccgggggcagcaaaacaagttactacgcattaggtggttggaaagggcagagccttattctctcacagctctgggggccaaaagtccaaactcaaggtgtcggcagggtcctgctgcctctgagggctccagggaggatccttcctgcctcttccagcttccggtggccgatgacaactcttggcgtttttcacttacggacgcgttactccagtctctgtccctgtcttcatcgggtgttccccctgtgtgtcctgtgtccaaacttccctcttctcataatttccctccactcatcaaattaggaccctcccctaatccagtatgaccttgtcaaaaccaattgcacgtgcaaagaccctgtttccaaataaggtcaggttcacaggcaacagggcttagacttgagcgtgtcttttagggggacacagttcaacccacagcaaaggggctctcgtgcagcaaagctgtggctccgcccggggagcaggatggtgctgcggtgtgggtgcctcacagtgagcccgacaccggaagttctgtgcacatccgtcctctgacgaggcttcgtggcctcgtcttcagccatcttctggtcacagcttagaaggttcctgttccttatccctcatctgagtatcccaagaagagaccagatgctcggaggctcagcacccagatgagtgcagaagtcactgaggctttccagggcatccgcctggagtgggaggacccttctcagtctcagatttgtctcctgcgtggaaacatcctccccaaatgtacttataaacagaaaccgactgaaggaaaaggcaagccttgcgctgggtctcgagtggtgaacagccacatcctaaagtggacaggtcttgaggtctcataaccctgtgtttagattccagcaagacctgaaactccacttccttatctgcctgtgctccctattccatgggagtctaatgtgtgtctaatgagcgcctagccatggcttggtaagaactgcagggtgagagctggatggcaagggtgtattgtttgcctggggcagctgaagcagatcaccggaccgcaagatgataggccaggccagccatcatgcgaggggccatggggattccagcctgaggactgagtccggcacagtggggtggcctggcatggggaggcatcagtgaggggtacagtacggcagccacagcctggatggccaggggagtgagggagggtggggtcagctggtgggtgcttcagagcaggccgcctctcgaggttccaccctgctctgggctcaccacacagcacgcagcctcctcgccgtctgtgtctgtccccagcctcctgccccagcctgggggctcatttgaggatttgagctggacaggggacaaaatgctgatgtccccacacacatgcacatgaaaactgggattctgagagtatctccacagcttggtgctgtgccctgggagctgcctgggttcgtcttgatgaatctgacacctgtcgctggaacccacgacttacttctgtgcagctggctagttaaacaggggtggaggtgagccctgctgcaggccagctgggttgactcccatggtgtggctgagtcggtgtgatgtctttgcagcctccgagggacgaaagcctgaacggccttcttcagggatacaggatctactacagggagctggagtatgaagccgggtcaggcaccgaggccaagacgctcaaaaaccctatagctttacgtgctgagctcacaggtgagactgtcccctctgtcctggtacagggagggaggttcccaggggacctttggcatctgctcagtgcacatcatggtgggaaacgctgtggaagaggctgagagaagaggcagccctgccctcaggaacagggagcaggcgggtttacccaccaggggcacacagggtgcaggtgtgcggcaggtgggtgcagctgcggaggcagaggggccttgtctaccacagactgtgttaaggggagagcagttgccaggcctccagtgactgcactctaccggcgtcagtggggaagggctttgggacctgagatggaggcagggggccagtaggaacctgttgcaaaacccaagtccagggacaggccccgcctgtctgtaccagacagcctcagcgtggagcccatggtgctcacccccgggctgattttggctctgcctgcactgcgccatgatcgttgctctgacgagggcccagctgccttcaagacagcttctagaaccctggagagggacggctgccctgcccgttcccacccctcctctgttggatggaggttagagggggttcatttcctggcacccaccaaacggtgtcacaaaaatactctttgccccttgacatcctcgtgccggggacagagtgaagaagcagctccagaacacgccgtgtggacggtgccctcccgctttctgccatccctgtggcaccagggctgcctacctcacgcgccaatgccagccgcggggccttccacgcacccagtgcgcggacggcagcagctcctatgctcctatgctcacacagcttgaccccagtacagcgccaggcatgatgttgatgaatgttgaagacgggaaattgcagcactggtgtctgcactgttggcacaccccaaaggtggcccttgctgaccaccagacagttggcatctccctgggctctgtcgcaaaatcaaaacagcacagtagaagggccccgggatgctgctgggcttacgcacctggtcgcgcagctctccctgaggtggtttgctcggctcctccagccggggctccctgcgtgagcatgagtcagctgcacctgccccggggtgaccgggagaaaaggtgtcctgccactcagtgctaagttgtgccaaaaactagcatgtttcactgaatcagagtggtaagcacaccccgcctgtccgggactggggtgccttgttgtttacgaggaggtgcggcagcccccgcaactgggagctggtggaaagcttgggcggtagcggggtctttattgccccgggaggcgcagcgtgggaagcggctggcatcccagtaaggcacctgtctcccttgttcctgccgcacatcacctgcgatggccgtgtccctgcgtgctaaccacctttctgctttgcttaccccaatagcccaaagcagcttcaagacggtgaacagcagctccacatcgacgatgtgtgaactaacacgtaagtgcgctctcagcgggaggcccatgccgcgaggcgcacacactgtgcccagagccagctggtctctcagtgcaagggaaaaccagcctggattaatggctccagttctggaatcgcctctcaaacgctgcgtctccacataccaaaccaccagggagataggaaaagaagcttctagaaacagaggctggggaaatttactaatatctggtcttcaagtttgggacagagaggaaagccagatagaacaagatctctgatctctccaacttccttcttcctttttctttttttaaagaaacactcttttttcttttcttttctttacttttttttttttttagagacagagtctcactctgttgctgaggctggagtgcagtggcacgatcacagctcactgcagccttgaactcctggctcaagtgatccccctgcctcagccccccaagtagctgggactataggctcatgcaaccatgcctggctaattgtgttttgttgttgttttttaagagacggggtcttgctatgttgtacaggccggtcttgaatgcctggactcaaacgatcctcttgtctcagcctcccaagatgctagggctataggcgtgagccactgcacccagcctttctttttttattgtggtaaaatacatataacagaaaatggaccttcttaaccatttttaggtgtacagttcagtggcattaagcacattcacactgttatgcagccgtcaccatcattctccagaactttctcatcttcccaaactgaaactctgtccccattaaatactaattcgttatacccctccccaccagcatccacattcaactttctgtctcgacggatttgacgactctggggacctcatagaaggggaatcatgtagtatttgtctttttgtggctggcttgtttcatgagcttaacgtcttcaaggtccaagcacgtgagagcaggcatcagaatctcagtcaagactgaataatatcccatcgaatgaaagaccacgttttgtttctccactcagcctcccttcaccctttcaataaaccacgttgtttctcctttgattcccagctagggaggagtttcaaaatccaactcaagggctagacgtggagccataatgtgatcgacttcaacacacagaacttggctggtttgggaagtggaccaggcaggagggaggggctggccctccccgagcctctgctgtgttcaggcattctgtaggggtgggagtgatttgcagggcagcacagctccaacatgttgagatactgactccacagcatgggtggaccctgtaagcatctctttgaaggcagccgtccaaggacgggcgcctgagtcacggaagcgttgctgggctggtagctggcaggaggcacaatttgcaggtccaagcacgccaccatccacaccagcacacaggcgccaggcacacacgtgggacctcggaaaagccaagccacccacagagcagtgttaaccagtgggagaaccttccagaatgttttggcttaaaggtcaattattctcaccctgtcacttagtgcggagctggtgcttggccccctgccctaaggagttctctgtgtacagcagcccacgcccgttctttcccaggacacggccgctaaggtctcagaggcctttggttaccagcgtccttctacattctattttcaatgccacagtcttactctatctgttcataatttcaaggagagattctgaaccaaaaggcaggcccaggttatgttatgtattctaactcaggggtctccaaccactttgacaccaggggtgggttttgtgggagacaatttttccatagaccaggtggtaggggatggttttgggaggattcaagtgcatcccatttattgtgtactttatttatattattagtacatcataatatagaatagagtgaaataattctacaactcaccatcacgtagaatcagtgggagccctgagcttgttttcctgcaactagacggtcccatcttggggggaggggagacagcgacagatcatcaggcattagattctcataagagtgcaaaccctattgggaacagcacgtgcaagagagccaggttgtgcaaggcataaggagcacgcaacctagatccctcgcacgcgcagttcccaatagggtttgcacttctgtgagagtctaagctgatctgacaggaggcagaactcaggcagtaatgcgagggatggggagcaactgtcaataccagtgaagctttgctcactcacccgctactcacctcctgctttgcaacctggttcctaacaggctatggctagtggcccaggggttggggacccctgttctaaatcctttactttagaggagggagctccgtgctgcctcttacctgaacacaggataggatgggtacgtcttttgcttaatggtggtgggtgcttagttaataggagagaaggagggtgccccggtcacagaggatgcaggtatttcacagatttctaacaatcccgcctcctctccttggagggtgctccttgcttcattgtggttcatagggggaactttggagaaagagaaggtggtcctggtggaagctgatccatatttccttcaaccctgcagatttaaagaagtaccggcgctatgaagtaataatgaccgcctataacatcatcggcgagagcccagccagcgcgcccgtggaggtctttgtcggcgaggctggtaagctccgtgcacccccaaccccactgccagagagggccacagtggtggggacagccaggcacgctgcggccaagcccctcaggtgtccagcagcgttctttctccttgaacacattgctgtcggggctgaggtctccacgccactggcagggaaagatgggctcagctgagagctggaatttcctgacagcttcagtgaatggtcaagtcttgcttttgagacctaaagggtttgttcgatacctggggccatcatatttactgtggctttgctctacgaaagtggtattaagtcagtggtgatgtaggtgtgtgggaaatggaacctcgttatctggaggggcagatgtttgtatctgcatgggtccttcagtgggcttcggcagtggcctggtgacagcccattctctaggtctgggagagccatgtgggccattgtctccaccccttttagataagatgtgactgttgggtctgattcaagggaccttgccttctgtggggctcacagtgggaagcaacgtctatttttagatcagatcctgtccctatccctctccgggcccagcgtgccgcaggtaatgagagcaacgccattccttcggccaaggagaccacagaacctcaccctcctcgctggctggtgactttaaagagttccctgacttcacatagagcctgatgtttctgctcttttccgctggtgcagatttagaagggtgttgtttcaggcccggaataattagagtgtccctgaggacagaggctcggcctagcaggagctgctgcatagtggggagggtgagatgggggggcaggggcggctcggactgcgggggccagaggagggaaacacatcaggtgaccttttgcaattgggaagggttattgttatgaaccaatcaatagcaccaagggtcaagcccagcggattttttccggaatggtcaagcggtatttgcatacaaatgaggatgcgtggagagaggcatcaagagcatacggtatttctgcctctctttgcacgaaaatatgttcaaaggggtcactcagagccaccgaggtacggctcagctttccctcagggatggacctggctgtagaggagcccattgagggccatggtggggccaccaagggtgctgtcagagaggggtgccagggtgccgtcagtaaagggtgggtgccactgcggacggcggccatggcagattctgtgctctccagttgtattcgggtgactgggccccagttggcccccatggctgggggtgggtcagcctgtggcatcgggggagcacaggaaaggagggccgggaactacagtgtctgaactgcaagcagaaggtgtgggtgtcagagctctgcctgagggtctgcctgcgcctgggcataggacaccaggaaccagggggctcagggcacttgggcaggccctgagaccgaggcagacgtccagagaaaagagcttcagcaagcggtagggaagccaggggtggtgcgggaaactggggagtcgcgccagggccagccaagcggcaacaggactggatgcccagcaaacagctccagctctatgcccagcgcccagctccagctctatgcccagcgcccggctccagctctatgcccagcgcccagctccagctctatgcccagtgcccggctccagctctatgcccagtacccggctctagctctatgccctgtgcctggctccagctctatgcccagtgcccggctccagctctatgcccagcacccggctccagctctatgcccagcgcctggctccagctctatgcccagcgcctggctccagctctatgcccagcgcccagctccagctctatgcccagcacccggctccagctctatgccctgtgcctggctccagctctatgcccagtgcctggctccagctctatgtccagcacccggctccagctctatgcccagcgcccagctccagttctagggtctgcgctgttggtgtcttagttccttctcacactgctgtaaagggacggggtaatttataagaaaagacgtttacttggctcacaattctgcaggctgcgcaggaagcatggtggtctctgcttctggggcggcctcaggaagcttccaatcatggtggaaggcgaagggggagcaggcatcccacacggcacaaacaggagcaagagagcgcaagagggaggtgccacacatttaatgaccagatctcatgagaactaagccattcatgagaaacccacccccacatccccatcccctcccgccaggccccacctgcacgttggggattatagctcaacatgagacttgggcagggacacatccaggccatataagtctgtcatcgtggtaagatgcgtataacatggaaagcattctccgtgtgcagttcagcggcattcaggatggtgagcagccatcaccaacatccatcgctggagctgtctcttcttcccaaacagaaatcccatacctatgaagcaggcccccttttccctcttttcccatcctgggcagcctctcacttactctctgtcactgcaagttcacctctcgatacttggtacaaatggagtcgtgcagtgcttgtcttcctgtgtccagatccttgccctcggcgtgaggtttttgaggttcaaccgggttgtagcagatgtcggaattgccttccttttcatggctgagtaatatcccattgcatgcatttaccgcatctggtgtgtctgctcctccagggatggacactcgggggccttcccccttttagacttgtgagtgtgctgctgtgagtgtgggagagcgaagagcttttcagcagtgcagagctgagacagcccaggtgtggggaggcagttgcagaggctacaggtgagcccggcctctgaggttagcatcacggtgtgatgtggcttctcccttccccactgggcccccatctccctcccctcccaacatgtgcatccctgctccagccctcctttccagaggcctgccctcctgccccactcctcctcaacacacccacaccctccacgtgactcacctctgcccagaggcctgggctctgccacctgcaccctttgcagtcccacagaagggaaaggaaagcctacttgctgtgcccatgccaccaaggccttttccatgcacacacacaaactccacgtggccacactgcactgctcacagagctcgaaggcgggtgctgagagtcagcagagccggttcccacagcatcacacccacccagagtgccctgtgcagcccctccagtttaacttggctgaggcctgaagcaccctttatgcatcttttttttctttttttgagacagcgtcttgctctgtcacccaggctggagtgcaatggcatgatctcagctcactgcaatctccatctcccaggttcaagcaattctcctgcctcagcctcctgagtagctgggattacaggcgcccgccaccacgcccagctaattttttgtacttttagtagagacggggtttcaccgtgttagccaggatggtctcaatctcctgacctcacagtctgctcaccttggcctcccaaagtgccatttaggcttttatcccctgaggagcggctgccactgccccaggacaccctctctgtccccctccctctaggcggggctcagatttcccctctgtgcggtatcctgggtgctttgtgcacagctctgccttccccccagcagcggggctgccttctctctaatgctgctcctccccattagaccaaggctgcttcatcccaaacagctccttgccccaggggtattgccagaggggatcagaatacctttgtcattcgggcaaattgaggttcccaaacttccacagggcaggagagcagctggggaaaccctgcacccagggacgtgtcctggagacagggcctcccagatatgctgagatgaaggcaggtggaatcagtgtctcatagcagggctgcagggaaggctaatcagaagctcctcatcctgagggagaggagggagaaggaacctatggtctctgtccctgtaacagcagataacacagtcaccatctgccgcccaggcactcatgttctaagctggtctttccatggggctccttcctgaggctcctggcagtagggagggagaggcagagctggtgagggtgcacaggctggcagaggctgtgaggccactttagggccctggcagatggggagcagtgccaggagccggggttcacacaagggaatgtaaccgcccagcaggctcctcctgcctgcagcacagacaaaaccagttcactgagcccatggtattgcagtcaaaacagagtttaattagagcccagccacatgggggaactggagttatcactggtcagtctccctgagggctcagaggttagttttttccaggatagtttggtgggcgtgggggctagggagtgggtgctgctgattggctggggatgccatcacggggcgtggaaaacggtcctcatgtgctgagtccacctctgagcggggccacaggaccccctaagccgtgagtcgtgagtcatgagtccagatggggtcagtccattttcagaatgcaaaagtctgaaaagcatctcaaaagatcaattgtagtttctataatagtgatgttatctttagaagcaactgggaaagtcactaattttgtgacctctggtcacatgcctcctgagcagtgagggattacttacccagcttacaggctgggtgcggtggttcatgcctgtcatcccagcactttgggaggctgaggtgggtggatcgcgaagtcaggagttcaagaccagcctggccaacatggtgaaaccccatctctactaaaaatacaaaaaattagctgggcatggtggtgcatgcctgtaaccccagctactcgggaggcggaggcaggagaatcgcttgaaccggaacccgggaggcagaggttgcagtaagccaaaatcgcaccactgcactccagcctgggctacagagcaagactccgtctcaaaaaaaaaaaaaaaaaaagaaagtatgcttatattttagccgagttcaggcttctcccatactcctaatctctcagccttttattagctttacaaaggcagtttccacccccaaacgaggagggggattggctttagggaaggaccattatcagccttgctctaagttaaactaaaaagtaaattcctagacacggcccctgcatccaggtctctgctccaccccacccatcagatgtggcttggctcttgcacacccaaaacaactcacacatctcctgtgccaggcctggcagtgccaaccctgcaagtggacatctcagttgtttggcctcagcacactcctccgggttctgtgtttacactgcagagagttttctggaaggagaaagccagttcgccattccctttctagcctctgcttctcgcagcccaagtacctgcattgtaacaaccctaatctgctgaggagaggcactgctaacgtattgacttagagcaagtaggccttcagaagaggaaattaaattgggccagcttccgtcccctcggctggaagcttcagagcaccacaaactcgtgggcccgaaatgctcaaaggcttttatgaaaactaagactttgctgtggtcccataggtaagcgtgcaggtccaagcgtcggctctactgtttactgcctgtgtgaccacgggcaagtcacttaacccctctgagtctggccttgagaccttgtgctgctgtggggagacctgtgagtgaggagactcaggtactggcttcattgctgccactaaggcaccagtcctgctcataagatgagtgtccagaatgtacctggcccggggtcagcccccagtcagtatttggtgaatgagggggaccctgggtgagtgagtcggtttgtctggcctcatctgtaaaatgatgaaatgttcagaatagatgatctctgggtcccctgaagttcaaatacgtgatacttaaatctgtttaaactcagagaggaaggataatttttagatttttagctgagattgatgcacaagcccaggcactacaaattggtaaaaataatccatcggtaaggactccagtgtgcaggaggtaggacccaacgccaacaagcttaagctgaaagaatcattattaactcctgcactggaagagttgcagagcctgggacagcttcaggcatggctggatccagcgccccagcaagctgctccatgtggcctcttggatccactttcctcctagttggctccttccttggtcaggctcttcatcaaggtggccatacagccctgggcacagagagcttcccttttctgcagtggaagtccactggctgtcttcagcctgcctttagttgcatatctgtccccaaactagttgctgcagccaacgtcctgaggtgcccaaagccagggagatgtcatctctacctggaccacctgggccaactgtgaagcgagagggtccctagaggagatccagtgcgacagtcagaagaaggggactcgggcattcaccaccacagctgtcctgcagtgctgataggcagagtttgactaggtggccagaaatttttctggtggaggtatggacagtgtctatgggttcctcagcaggagagctcttcagatgacccagccagagttctgggcccagctccacattccacagcgttccgggcactgtgggaccacgctccagccttcaagacactcactattcatggatgggccctggtctcaggttaagcctgcactcctgcccagaccccaagcaggcatctcagcccctgcctgtatttccagagcccccaggcttccccctccttgagtatgtgccccctcatccataccaagctgtttccgcctgggatgactgctccctactcccgtccctgggaggacagacagtcctccctcccatgcagccctgcatccacgcgagcccttggatggggcagctgtcttctctttcccgggcaggattagctgtttcttcctctgctccagaacatgccacgtacacagctctttgcatatccacctgaggacaggtctttttctctctgagttccatgagggcagggacccctcttatccccagaacgttagcataaggccagaacatagaaaacattctgaagatgttagaggaagggtgggagggagagaaacacatttagacaggaaggaaggaaagaagggagggagggagggaggaggggaggggaggggagtaacaaacatagcccaggccaccggcccagaagcacaagtgactgagtgacccctgagctctaaggggggatggagcggctccagggcccagggagctcagggagggcctaaagcaaggcttcctgtccagaggtgcccggcccagctctcctgtttgctctgcaactactgtcctttcccaggagctctaaaacagttaaagctttaaaacaaaacgaaacaaaatagcaaagctggcctcacacaccaaacaaagcttgtggttttctgttcatttatgaatccacgctgaccgaaaactgattcagccccagatgtgtcgtggggacactaggggcagtcaagttctacccactttgccctgggggtcctggcacagacaagcatggccgccagcccagctcccaggaactgcaagagcaggacctcctctcctggagcagggccctccgacacccaccccggctgctgggacccctcgtgcacctttgttatccccagggtcgctctttagccagagttagtggcagctgccccaggacagagcctccaaataaaaagaggtgctgtgtccccacataggccgcctccttggagcctgtggcctcgtggttccctcgacccttagctcgtccccggagccggctcgccttccccacctgctgagccctgccactgatggtttaggtcactcggcggtcctgggggcttctggggcctacagctgggaagctgggttggggtgaatcaggaggaagggctgccgtcaatgagtagagccccccgctgctccagcttcctagggagagaccagaagcccccagcccacctcactaagccctcaaatgctgtgagcatgcctgctgtctgtccagtgagtctaggaggtgccttggaatctcctgggcccgtatagacagtgcgggtacaggcatggcccttctttggggaggaaggcgcccctcctagcctcctcctccacgggccttctccagttcttgccctgtgctttggggtctagtagtggccagacctgggattgccacccctggcatctgtagcctccttctgggggctgcaagtagtaggggctccagcatgtctacctaggaggggctcaagagccacactgtggttcggagtggggcttgggacccatcttgactgtgtttgcagtgtgggttgtgtgcatgttgggtgtgttatgtctgtgtgagggactgtgagagaggacaggtgggcttgctgctacatgaggcacgggggccaagtccagggatgaggcagggggcacctgagggagtggggagggctgggtcccatgtgggggtaaacctccatagataacccacggcattattaccattattttccatcatccaatacatttgcacaagactatgggtccagcaccttgctattagaaatgaagctactctgaacactgttacaaatcttttccaacgtctccaatgcctgccttgggataaaacgctagaagcagaacttctggtccaatgacatgaacatttttcacctttgaaatacttcagctaattgacaccctgcagcggtgaccagatacagggctcaggttgcattcctctttcctcctgcttttaaatctttcctagtttattaggcaagaaggtatctcattattattttcctagatgggcttttaaatgactggtctgtgattaaatgcctgcagagctcatggctattttttgcatgggggtctgttacaaggtaaactgagacacaaaatgttagaagagtttattcgagcagacagcaattcatgaatcaggcagcaccagtccaaaggtggtttggggttctgtgaagggaacacaaggggaacgtttttatggtgtgaatgtgggagctggacaaagaaaatacttgataagagtatgttgttgccttcttcagtctcaactgttagaaaattcctagttgtattggttttcatgctgctgataaagacatagccaagactgggtaatttataaagaaaaagaggttgaacggactcccagttccacgtggctggggaaggtgaaaggcacgtcttaaatggtggcaggcaagagagaatgagagccaaccccttataaaatcatcagctcttgtgagacgtattcactaccatgagaacagcatggggaaaaccactcccatgattcaattctctctcgctgggcctcttccgcaacatgtgagaattatgggagctacaattcaaggtgagatttgggtgggggcacagcccaaccatatcactagctgtatatctgcctttagttgcatatctgtcctcaagctagttgctacagccaacgtcctgaggtgccctcagtaagttgttggcggcttctgattggttgggcttaagttttatttttctttaatatgggcatttacaagaaatagcccaggttaagttttgtttaggtttgcagaaccagcaaggtcaaggttgtctccacggcttaatgggctttgctcaggggattctcaagcctggtctccattttattttaatgggtcttagtgttttgtgttgatttcttagagcttcttatatattagggatatcatgtttgatcatgtctatggcaaatactttgtctttaattttattgtgtttaagtggttgtgtgctcaaacctccatatctgaggcatctctccttcccattttgagaccaagtaaatattcacccagatattttttcataattttcatggttttatgttttccattaaactctttcatcaaaaaaaaaaagaaagaaagaaaaaaaaaactctttcatcctcctggaattaattctggagcctggcatgaagtgagcttctaaatggatcatttgtttccagagaagttttttcccccgaaaccatctattgatttttaattgctttgtggtgcgtcttaatcatggtttaaattcttacacacagtcaagtctgtctgaagacattccttcgttccacagacatctttactgttgccctagtacttctaaagctttcatttacatcagtttgttacacatttttttcatgtttaggagggcttgtcttattcctctttgttttctaaaatttctcagccattctatgaattttacaatcattttggcaagttcttaaaaaaaagcaaatgctcctgggattttgatggaaacgtattaaatagtaaagggatttggaaatcctcgccgtcttcctccttttcgtctattcatgcttgctcccgggagctggctgtccctctggcaccgtgctgctgggctggcagcgctcctggtgcaggtcctgctgttgcttgtcaagtcattcctggcagttttattgcggcggttgctgtgagcctgggtattgtaatggctcgtccctgctctgcccaccgccaatcgcagctcaaggctgaggctcacatggttactcaggcatgttaaatattagtccagcaaaaagagcaacataggttttccccaaaaagcgagccaggacttgccttttttccacacccaatggggagtggctgcccagctcagatgagagccgagtgtccagcactgtggcctttagccccgcaactttcaccaaaaacagaagacagacagatacccatgctcagcatttaaaatcactcggccggccaggcatggtggctcatgcctgtaatcctagcactttgagaggccaaggcgggtggattacttgaggtcaggagttcgaaaccagcctggtgaaaccccatctctactaaaaatacaaaaattagctggatatcgcttgaacccaggaagcagaggttgtagtgagccgagattgtgccactgcactccagccatggcaattgagtgagactccgtctcaaaaaataaataaaataaaatcagttggtggctttaggtggtgtttggttgttcctggtgtacatgtggctgtggaagacagaaaagtgtcttgaaaatatctgtttgctgtttttaagaatgaaaaaattgtcgtacaatatgggtcccacctttcttctaagtgctccaagtttttaattactgttggttggaatgagagaaaaaaaaaagcacagcttctagctgtttcagctcccgctagtgacaaataaagccagtcctagtgcctattaagtgaaattaaaaggcttcagtgacgccagtttgaaaacatgtgtttgtagggaagagtgaatggcacctgtttacagggtaattaacgtcgcaaccccgactccacaggctgcactgtctcatcatcgacgttcccagggctccctgggtaattattaacatatcacgcgataatgacattgtgcaaaccacaggccgcccctgtcatttctgcggccacagtctctccaactgatgccggtgggctgtgctgcgtacagggctgtctacacggtcctggatgatggataaacatctgccgaaagcctactgtgctggtcacagatggtcaccatcccctgggtgggaaccgttgctccgtttcacagatgagagtgatgagtcagctttatccggagtccgcagggggctccccgggcgctatcccaccctctgggctccagctcgtgttgtttcagacgttcccttcaggcacaaatgcactaagaagccctcgccaaggagtgcagagtggagagactgtgggatgcaggtgcctccgccgtgggggattctccaatgcgctgcacccggcccacagcaggctgtgcacaggcactgctgactgactgggagcttggcccaccccttccccatgccagggagtatttcagaattcacggcttccttcaggctctctgcagcatacgctatcccgggacagcctcttgccaaagggcgggtgataggagcagcttctcagagagctcccaggatggagctgtggtgcccctaggcagacacagcccccgagggaggatgggcttgacaccagcctcatcaatgctgggccggagggtggagggcggggaggctccttgcccacaggtgcgagcctagccaggcttctctgggcgggggctctcagggaagcctctggggcctgtgtccacccatcctctacacttctgctggggtgacccttgtgaaatgcaaatcccatcccctcactttctgtttccacccttcaggggatccctgttatgtatgcgggaaaaatcaagctcactcctgagactggccccagggactctgaggtcctgccaggccaaccccgcggcggtcacagtgggtgtcctcatggcccccaggccctcccccgccgcagtcacggtgggtgtcctcctggcccccaggccctcccccgccgcggtcacatgggtgtcctcctggcccccaggccagggttccctttcgtgctcaggcttcacacgcacagcccggcagatgcccaggagaccttggtggcgggctggtagtattactcatctgacgtccatcactgtagacaaaggttgtggagcatcgcgcggtgcccgctgctgcatttggaaaggctccctcacctctcaccatcctgagtttcactccttagccagcttctctgggatccctccaggtcgccacgctggcagccagtggaggcctttcttcagcacccacttgctcagcaacttgctggcaccgaagggagcgagagagccctgaggtacgggcctgcccttcagctgctcccccgaagcgtgagccagcccttcagctgctccgccagggagagggaggatcaccggcctgggcctttgcgaccttctctggggttgagtctgcaagggttagggtctcctgtgagtggcagagctcagggtggacagggggctgcaggtgggctctgcaccataggagaagctgggctatccccacagaggagggaagcgccatctccacaggtgtggccgggcagaccacccctcccagggccgcgcgtcacgcacaaaagtggggttcacatccaacccactgttgagagtgcaccagaacagcagatttgaaagggctttgacggcagtttccgaccccacccccaggcctctctcaaaccctcgccctgctcctcctctccagccacactctcttccgagagaactcttcccctctttgcctgtttctctgttgtttaacttctagatagggaaatctcaagcatacacagaaggagacagacaagtgcaggcgcatcacactcctcacagttggccttagtgtgcttcgtagatactgtgtcagttacagatggaaggtttggggcagccctgctgtcagtgccattttcccaacagcacgtgctcactttgcgtctctgtgacagcatcttttttgcagcagattttttgtttgtttctttgtttattgagacggagtctcactctgtcgcccaggctggatagcagtggcactatcttggctcactgcaagctccgcctcccgggttcacaccattctcctgcctcagcctcccaagtagctgggactacaggtgcccgccaccacgcccagctaattccttgtatttttagtagagacagggtttcactgtgttagccaggatggtctcgatctcctgaactcgtgatccacccgcctcggcctcctgaagtgctgggattacaggtgtgagccaccgtgcccagccagtaaagtatattctaattgaagtatgttccgtgttttttcagagaatgctttgcacattgaacagattatggtatcgtagaagcatagcttttatatgcactgggaagtcaaaacatgtacgtgactccctttttcaatgatctggaaccaaacccacaatatctccaagacccgcccgtgtcgagaacactcctgcactcgccaccagctcaaccacaaggcagcacggccagtctggcttcatccaaacatccacctcctcccctcccgtgtgatcctcaagcagctctcagacatcatatatagaggtttacaacatcatatcattttattcacaaatacttttaccatatatccctataataactctttaacatatgtattaggattctctagagggacagaaccaataggctatatataaatatataatatataaaaatatataatatagattatataagatacaaaaatatataatatatattataatatataatatataaaatacaaatgtatatataatataaatatattaaaatatatataatatataaatatattaatatatttatataatatatattaaaatatttatatattgtataaatatattaatatatttatatattaatatatatattgtatattaattgtataaatatacaatatattgtaattaattgtattaattacatataaaatacatataaaattacatataaaaatattaatatatttatacaatatataaatatattaatttatataatatatttatatatattaaaatatttatatatatatatatatatatataaaggggagtttattaaatattaagttacatgagcacaaggaccaacaataggctgggatattgccactactggggatgaggaagctgttccttctggcaaaaaaggttcattagagtttacaagctcagtgtccccagcttcatcaaggtcctcccacacatccccattccaagttgcagagtcccattctttttcggtccatgccctcactttaatagtagacacctggcaaggctgtgcatgcaccttaacttgcaggtcagccactcacatggtaagagcttgtgtctgtttttccacaatttcagctcttcctctacaggagtgaagactctcactcaaggcaatcttagcagacttgagactcagtatctgcttctgaagctgggagacagaatccctgagttcatcattttctttcatcactttgtgcattgaacttaggagcaaccaaccagcttcattatgtttcttggttctccacacatggtcagaggtattatgtatagagtccctaaactccttgcctctcacgagcggtgaatcaggagcgtcaaatgcatttattttgcataactctctaaacaattcacgccaaggactatcagcattctccatactactagaagtagagtccttagcatttttggatctaatcatattaagcagccaactccggaaaccgcaaaaccaacagaagaactccatcctgaatattctgtctctctagaaccactcctggtaccaaaatctgtattagtcagggttccctagagggacagaactaataggagagagagcgagagagatatatatatgtatacacgtatgtgtatacatgtatagatatatgtatgcacgtatgtgtatacatgtatagatatatgtatgcacgtatgtgtatacatgtatacatatatgtatgcacgtatgtgtatacatgtatacgtatatacatatatgtatacatgtatatatgtgtgtgtgtatatatatactcccatatatatgggagtttattaagtattaacttacaggatcataaggtcccacaataggctatctgcaagctcgaggagcaagcaaggagatccagtccgagcctcaaaactgaacaacttggagtctgatattcaaaggcaggaagcttccagtatgggagaaggatgtaggctgggaggctaggccagtctcactcatttcacgttttttctgcctgctttatattaagtggcagctgatgagatggtgcacaccacattaagggtgggtctgcttttcccagcccactgagtcaaatgttaatctcttttggcaacaccctcacagacacgcccaggattaatactttgaatccttcaatccaatcaagttgacactcagtattaaccatcacaatgtataactacaaagtcattcttacacctaagaaaattataataattgcttagtgtaatcggttagctagtcagcatttgaattcccctggaattttctgctctgacagcccacagttctatccttctagacttgtcagccctaacccatgccactgaaaccatgatgcaaatcaatgagctgctttagaaaaaaaaatttgtatttttaattgacatataataatcgtatacatttatggagcacaaagtaatgtttaccatgtggaatgattaaatcaggctaattagcatctgcatcacatcacattctatcatatttttgtggtgaaaacatttaaaacctactcttctagcaactctgaaatggtgcaccgtgatttcttatagtcacgcgatgcgctgcttgttgcagagtccagtgggtgctcgcgtccccggtcttgccctggcctttgatttgaggccgactccttgcctggtttccagaacactctgccctggctgctgcagctccgcttctctctggggtttcttggggctcagcttttccccgtccctcccccacgtcactctccatcctcagctgcctctggagccacagctcccaaatgagtcccctcccgcctgggagtctcttggggaacccaggcctgcaattcccactgtctgcctggcatctctgccgggcgcacccacaagttccttgacccaacttgtccaaaattgagtttctgtgtagtagccaagagcaagcacttagaagccagaatgcccaggtctggctcctggctctgtccccataaccctgggtaaattactccacctccctggggctcaatctccttgcctgcagggctgcagagaggaccagatccgcagagggccctggaagcagtgccgcaggagctctgcctggggatgaagccgtcgctgctcctccccagcctctcggcagcagcagccacggtggcaacaagcctgctaacatgtgcccttgggagggtgcctccacccaccccaaaatccatgacagaaaccccagcctcagcccaagtctctccaccacacccacgcattacatattgtcagaggctgcttttgccctaggaaagcagagttgaatagttacagtgaagcccttcagtccctcaaagcttaccacccttcatgtctggacttttactggaagtatcgttatgtccaagcctagagaagcagcgtggaccttagagcaaggcagattcaggtttgaatctagctcattatgggggatgtgacttaacccctcaaggcctcggcttgcttggtcccctggtcactgcaactggtggattccaggcccttgccaacaggtccgcctctgtcactcttcttcctgttgcagccccgccctcgctcagaccaccctctgcagcctgtgaccttgcaggagctcctccgggctgggtccccacaccctgtgcactccctagctacagccaaagccatctctctcatgtacagctttgactgtctcactctctgctttcaaaccttcccagagaaacctctgatctctaaagccattcagtcccctggacgtgcggtgccgtctctcccgggcctttgaacacacagcctcttccacctcagctgctggcccctccctgccccttgctctccacgccgtaactctcctctccactgttcaagtctctgcctggatgcacctggccaggggagccctcctaggcccaggcactgcccggggagccctgctgctcacccccacagtgctctgggctcattcccagcacagagcccaccctgagggctggaactgcctgctgacctgcccgtggcctgctctagaccatgcaccacgtgaggacaagtggctgatgccatcccaggcacacagatcctacctcatgagccagtgcttctcacggtacctagtggagaagcattcggagaggatttatctgatggatgttgactcttggctaacaagggctgcctctctccatcccctgactttttaggacaagaccagagatgctaaggccatagctaggaaagtcaggccctggaatgagaccgtctaggcttgaactccagccttgcttcctgttggagcatgctatttaacttttcatcttattaaacagaaataatgggagtggcctccaacgatctgctgtgcaatccacacgggcaaacatgaaacctcctctcccacctggggttagagcagcgaggagacccaggctggccaggacagagactggtggtactttgcccttgttaagagttcttggggccaggcatggtggctcatgcctgccatcccagcactttgggaggccgaggtgggaggattgcttgggctcaggatttgagaccagcctgagcaatgtagcaagacctcatctctgaaaaaaaaaagaaaaagaaaagaaagaaagaaagaaacaattagatgggtatagtgatgtatgcctttagttccagctacttgggaggctgaggtgggaggatcgcttgagcccagaaggttgaggctgcagtgagctgtgatggtgccactgcactccagtctgggaaacagagcaagaccccatctcagaaaaaaaaagttatttgaaaacattcttccacaaggagaaaaagaatggatgcttcgcggtcaaggcctaatagccagccgggctgggctcgtgtgaggctgtaaaaccccatccgcagcttctgtgatggtgtacaggggagcggaatgcctggtgctggcgtcaggctcactgtcctgcagctctttgctggcctggcctgttctccaccctcgtttgctcctgggtcttgtaaacagtgttcctttgaccttcccctcgaggaccagagatcacttgctgtctggcgcaggcgctcctgaccttcagatgtgggaggactgtaagaatctcagggagacccccacccactgcttgcggtggtctcctttgtcatagacgacagatgcttgccacacgcaagcagaggcagggcttaaaggttactctcatttctcaggtgagaaaaagcaaagtgcagatggtttcggagggtcctccaggaatgctcagctcatccgtgggaccaggacgcacaggcctgcccactgcatctaaggcagcgaggccctgtggaatcaaatcagcactgagacagagggctgcaggacgtggtcactgagggcgtgaagccagcctgtgccctcctggcctcacttgccccgtagggcctctcatgtcacgtcacctgcctctgtggaaatgtcctgtagctcctgtttcctgcagggtgtcacagaagcgccaccttctgctagcggcccaaacccatcacacacccccctcatttgcccctcacagagtggtcagaacctactgccagttcccactgcacccctgacagctgtagggttaaaggatggggacaaagtcacaagggtgttggctgggacacctgggccaggtgccttgaattctgccccagggctctttgcacttgacgcaccagctcccagtcaaggcctctgctctcattgcagccctcctgcacttccttcctctgcctcggagcaggatctgcaaacagctcagcggccaagcctagcccattacctgttcttgtaaataaagttttattggaacaccgccacacccgtgcatgttgttggaggctgcttttgccatagaaggtggagttgaatagttgcaacaaagcccttacatccctcaaagcttaacatccttactatctgggcctttacctaaagttgtgcgactcccaccttagagaagcagcttggaccttagggttaggcagatccaagttcatatcgagctcattctgaggcctctgacttaacccctcgaagcctcagctttctttttctttcttttttctttgcttttttttttttttcctttgagacagagtcttgctttgtcgcccaggctggagtgcagtggcgtgatctcggctcactgcaacctccgcctccctggttcctgccattctcctgcctcagcctccagagtagctgaaattacaggcacgcaccaccacgcctggctaatttttgtgtttttagtagagacgggggtttcaccatgttggccaggcttgtcttgacctcctgacttcaggtgatccaccctcctcggcctcccaaagtgctgggattacaggtgtgagccagcgtacccggcctcagttttctaaaaggagaatacagtctttctccaacaggttgaattttgtgtgtacaaactgcatataatgcagttaatgagttaggggctgtggattgcaccatggaggaacaccaccgcttgtgatgctgtcatgatctgtgaggacccggatcttcctgtgatggggactcactgtacgggccaggaagcacacacagtccgcaagccgcagagccggttggctcaagcgtcttttaactttgtttatcataacagtgggtgatgatggctattgagctgataagaaggtggaagcactatttcctgatgatgggaagcaaagatcattactggacgaaatcaaacgccagaattgtctagcagtattgaagtttcagagctaacctttaaaatggaaatatctgtaggacaaatatgtttgttatcgtgagtctgaagctctctggcctcatcctccttttcctatggaaacaactgcttttaaaacagtctttaaagctactcggtttgttagaattgcagctgccatgtcacagcagagcagactaaggccatcccctggggctatggaaggagagtgtcccctgtcccagctgccacacctgtgctgctctcagcccctcacctggagtgctctgcctttctctccacacatccctgtgctcagtcagaacttagagcacacagcaactcctcctcttctgtgttcttgaggcacctgtactcagcgaaccactcaaattaacccatgcacagttctagaattctgtcatcctcactgacacacctgccaataaaaaccccatctctactaaaaatacaaaaattagccgggtgtggtggcgggcacctgtaatcccagctactcaggaggctgaggcaggagaatagcttgaacccaggaggcagaggttgcagtgagccgagactgtgccattgcacttcagcctctgtgacagagtgatactccatccccccaccccacaaaaaaaggccaggagcatctcttagatttcctctgcgtacctgtagtgccccacccagagccaggtctgggtgtgtgtaaagacatgtggaccctgacaatggattatcacctgtacacccacaccatgaaatccaacattcatggcaagggctgcaccaaactccaggcggtcttggagacttcaaaatgtgcagaggcttggctgaggccggcaccttcctagaggagctggagctacagctgggatgtatcagtcagctgttaccacatagcaaatgatcccagtatagcaacctaaaacaacacacatctcctaccttggtttctgtgggccagaaatctgggaataacttaggtaggtcctctgcctcagggtctctgggacagtgtcaaccaggcctgtggtcttctctgaaagttcgaccggggaaggatgcatttccaagctcacccatgcagttgctagtgggattccattgttcgtggacttttggacttgagttccttgccatgaagggcctctccatggggcctctcacaacatggcagctggcttccttagcatgggctggccagaccacaagagcaggtgagcaggagagatggcacaggctcttgttgctgagtcacagcagtgccacattctagtccttagaagcaagccatgtattcagcccacattcaagggaaggagattctcagggcataagtaacaggaagtggatctgcaaacagctcaggggccaaatccagcccattacctgttcttgtaaataaagttttattggaacattgccatgcccatgcattacagattgttggaggctgcttttaccataggaaggcagagttgagtagttacaataaagtccttacgtccctcagctcatgtagggacctgaagctcctggtgggcagggcagatggcactcagacatctggggtgcactgggcaccatgtcctttgttcctagggctatgcacttgcccagacacggggctctgcatttcctgggttgcttgctcaggctctgctgctggctttcttgcacttctgccttgagtcattgctgtctatctccaactctcacttgtccccacctgagtagaagcagggtgatccctttaaacctcctgattcattgagaaggcctcccgagctgcagagtcacccagaatggagcctgtctccaggtccccctgctcaggggagcagattgcgagcaagatttgccaagaaggtaaatgagatcagagaattctatttcccatagttccttaggaaatcagaaagagaatctcaccagtttgctttgatgtcattaaagcaaactgaggaatatacaatttttaaaaaatcatataaagaaaattatttcattatattaaaacattaacattgattctcaaattatccattaaaaccttgctttacccaaacagtcagtcaatgggctacagaaactgaaagtagaaatctggcatggtctatcctggtccagtactgctctagccacagcagatgcctggcatggcacagggaggctccggtgacaggaggcgcctggcgtggcacagcgtggctctagtgacagcagacacccagcatggcacagggtggctttggcaacaacagatgactggcatggcacagggtggctttggcaacaacagattactggcatggcacagggaggctttggcaacagcagacacccagcatggcatggggtggctttggcaacagctgacgcctagcatggcacagggtggttctggcaagagtggacacctggcacggcacagagtggctctagcagtaggatgaccacctgtctggtgtgaacctaacatgcaccccgtgttcccacccttctactctttctccttccatctctatagtcagcagtgcccttgctccctggcccactgtcacgtctcaaatcttccctgttatttaaggaccagccagatgttctactttccaggaaacatccacatccctagctggacatgctctctgggccccgaccctgtccccacactccgcctggcaccgtgattattgtgatgcgtgtctctctctgatgaaacttgtctttcacatctggtgtccacctgtccctcagcccaaggcctagaccctggttaatattcaggaggattttggcagcgttaggctgggataacaaacaacctccaagggctggtcccaccagtagtgctggtccctcccgctgccgccctccgagtgccagcatcttctcttctgctacctgccattttcatcccaagactctggttgggggagcagcccccgtgtgactggccagcctcagggctgctagaagagaaggttccaggccatgtgactctccagaaagtgagttgtttggtcacgtggggccagaggggaaaatgtgcagtcctccctcagttggagcgaccgccagtcacagggccatgtcgctgtccccagatcaaatggatgaccttccgcctggcggacggtgaatgttttgaatgagtgggcggaggctgaatgaatgagcatcattctccctgcagagttaattcctacagctctgaaacttttccctcactctctgaagcctccactcctccaccaaatgccacgtagaaccgttttgttttgtttttttctcctgagatttgagtcacaccggtgcctgtccagctgcctcaacttgcagcagaggttcctaaaccctgaggtgagggggctgcagcccaggcctgccatgcagggctcaggttcaccttgggtctggtgggacatggagttagaaccatgagctgctggtgctctccacccaccagcaaattaagactaagtcagggcagccactgtgtcccagcggctgcttttgatccagctgaagctcgctggccacttagggacggcgagcacagggaggttgggcgaggcgacagaatgccgtccttgctgccgtttggggcttggctgcagcctccagcccaccccttcccgcagaggcaggaggccacgccataacccggctcaggccccagcgcccagccacgcaaggccatccaagcaaccagccagaattccagaacatttcagaaatgtcaggaattccacgatggctgtcaggtgagggtccctccagaagtcctgaaagcttgtctctcattgcctcagcaagatccctctcccaggccgcagaggccccctggcgagggtacaggacccatcacaccaaggacctgagtcactcagctctgcgatggcatcgtagccttagcgtgagaccccagagaaaaccccagctttgcacctttccctttaaatgccagttgcaggcaatctccctagcagcagacgccagcaattgccggtctaaaatgctttttaaaaataatttcatgtattttttttttaaaaaaaaaaagcttccaagctggtatgtatgtcatccttacaccgcaaatgctaaggtgggaaaacaaaaaacgaacgacaatcagatgctccgtgtctcccaaactgcacacgctttacggagaaggagagttgcaccggggcttgtcaatggcagagccttcctgaaagtcaggttctcctgtcagggtggagacccagcggctttcaggagcaaaaaagaagtctccaaaccgacacgctttgctcagcgttgacatatatttctctcttccctgctggtgtcaacaaaaaatgctttgttgcctgcagtaattttacggtccagaagtgccttgctgtagcattgctggtaggcacggcagtgcggctcagctgcctgagacagggtcatgggcctttgcccagctcgtctccaccccagagaaaggggcatgcgggcccctaatttatgggggttcacctggcgctcacagacccaccagttcctacaggcggatatccaagtccagagctgtcgtgggcgcgctgagttgggccatctttggaaagaaaccctggggctgtcgcggggggagggcgatgtctcaccgactaccagggtaatggccgcgctcaattttgcctttcacattttaattgtacaacagtaattttgcaatggagttgccgatggcaaacatgcaaaagacattaactttatttatgttttggattattaatgtggctgttaaaattcctccagttagttttgattgaattgtttttttgtgtgattctgctgtttaatggggcggtaaataagaatttctgataatgaggctgagcatctgtcacaacaacctggtgtgggctattaacatttccattaacggcagggtgggcagtgataatacggaaaccacacagttagaacaaaataaatagttggtgtcaggctgagtgggtgttaattactattttattctgcgctggggggagagagcagaaagtggggagggggtgatggggaaggggcgagtcctgaggtcagtctctcccaagaaggcctctccagagagccgggtgctgggccatctccctcggacagcgactgttttatcgtctccatcgatggtccgtaaagacactcagtcaaaaggctgcactcctgggccgcagccccggcggcaggcggagaggagtgctcggctggcctctgcctccgggagccaggccccctgcacagctgccctggagctccccagggcccagctcatggacagccgggagagccccagtgggaggagggagtagcagagaataggccgtcaagagaaagtgcgcagcgtggaattcaaagatagtgtgaagctggcatggggcagacaggacggaggcgttctggaacgcaggcgtgtgctcccaactgcctaaatggctgtgtggtgaggtgcggaggtgcggccacacccctaatggcggtgtggtaaggcgcggaggtgcggccgcaacatcctcatgtgtcctttggtttgcgtgtgccatgcagccctgcagacgcagacagcaccccagtgagctcctccccagggggagcgagggggctggaggggaagactggatcctcagaacgtgaagccagagctggcctcagagagcaaagtgcagccatgttctcaaacatcggagcttcctgtccctcttagaggggcaactctgtgtatctggacgaacttcatctagatcagggcttcatagccagggatgcctgaacctgtcatgggaacacagctatcttttctctaatctcaatcagtaatattagtgacaaaaaccacagcagtcaggagtcctgtgactccctcgccgatagagccgcagtgaccctgtcacatcccaggcattgctgggacctcaagttaacatcctcacccaccaatgctttgatctcacagcaaccatcagaccagcccctaagcctggtcaggtattaaccaagaagcacgtggattacgatctcatacctttggtttcaaatactctgctaactgtatctcggtataattatttttctgtgcaattctatatattttattgtatgcatttaagaacatcgtatgggaaggatttgtggtcttccctggcataaaagggctgagagctcttagggggacacagagccacggatcccaggacataactgtctaaggcctcctaagccagggcgacggcccagggaagaatctctcacatggttcccagcggaattagggcatgctcgagccccatgggcatgtgggcgagggtccgggccggctctgaatgaacgtctcagcttctctccgcattgctctttcctcagccccggccatggccccgcagaacgtgcaggtgaccccactcacggccagccagctggaggtcacgtgggacccaccacccccggagagccagaatgggaacatccaaggctacaaggcaaggccctcccgtgcggttgcctcccctggctcgcttgggcacccctcgttcacgtggtcctgcctactgcattgccagcagcagaccccgcaggcgctccacctggagagctggggcccaagcgtcggagcttggctagacctggcctgttaactgtggtcacagctgcttgtgggtgggaggcagcacaggggccaggctcactgcacacctggctgtgcccaccacaaaacaacccaggttgggggcccttgtttgtccactggcttctccccactctggacgcatggcctggctggggaacccttccgtttcctgggcccattctggagcccccagtacattggctgactataaaagaacatggggcgcctggaagagaccaggctccccatcccagctccccccttggtcacagttggacactgagtgagtcccttgattcggtcggtccagggtggggcccgccagtctcattcctcacaaggtcccagatgtgaggtccctgggaaccctgctttgagaaccgccacggtaacatgtgagaagcccattgtcactggagggtctagagatggggagaaaggaaggcagcaggccatgacaggagagcgtcgagtgaggaatcattatgtggggctgggttatccatggggcgggaagcacctctccacgtcccatccctgaggcctggcctccttagagagtacagggcccataagcatccggggtctttgccatgaaaacgcccccatccttctcctaaataaattcccctgtctattctgctgggacccaagtcgatcagtcatcagattctgggggctagcctcccctaatgactattggaccgattaaatgtccatttaaagatggtttttgcaggtgtgttatgaaaattaataccttcctccatggcagggctgttacagtgatgaatgagctaatggagagccccatgagcttggaggcatggcgctatttatgtatgtccaaaatatgttttctaatttccttaatgataaagacactgatcttggatattgatctcaagttagcaaggcctgggcgagcggaagatcttagacggtcaattcagtgagcagaagcccactacatcctgcaggtggaaatgaacgatgctcaccagtcagggcctgcccagcaagagcaaggcgggcgggtgtgcgaggcaggcgtgccagccctggggcgctccaggctgcctccccgaagcctccgtgctgccttttcacatgggcaagccgctctaacagcctggccctggtttagacccacagagccaaggtgggtcttctgattggtgttgtctttgggcagcctggctggcactggtcggaggtagcagtggtttccggccagctgtctagggaagcaattctggcaacctctttaaacctttgtgcttgggcgtcaagttcaactacaagcacataaaagctagacaagaggaaatggcaccccagaggaatgaggccttcccagcagccctgagcccaacatagttctcctgcctgttgtttttgattgctttaatctccaaagtatattgccatattgaggaaaacttagatgtcggctctgaataaaatgtgggaacacatcgtaggagttgggggtttgttgtctccatagctcggagcagggggtggacacggggcggcttcccttctctccagaagatgggggagagggagaggccaaaaatcaaaacaccaacagagctaggtctgcaaggaaaggcacatcatcggcagctgaagggcagcttcccttccgtcctcacaacttatcttcaacagcgctttgtttaacgaggcaatgctcatactctaggtgagcaacaggaaaatgttaaacatcgtctcccaaacaacattagcagccaggggtccccgtccatacacagtagcctcagcttctccctgattcctccaggagggagcctttccaccttcccacccagcacagctcgccccagaactcagctcaccccctcgctttgaccttacactcagtggcccccgcttactggaaggcttccccaggacccaccccaacctcttgctgttcctaacagatttactactgggaggcagacagccagaacgaaacggagaaaatgaaggtcctcttcctccccgagcccgtggtgaggctgaagaacctgaccagccataccaagtacctggtcagcatatcagccttcaacgccgccggagatggacctaagagtgacccccagcaggggcgcacccaccaggccggtaggaggaaggcgggtttcctttgggcaggcctccttggacacgtgttttgagagcgccagctcaggtcccctcacacagtggttcccggcccgcccaggcggaaggcaacaccttttgagtagctgggagtttctggatgggcaggactgggtttggctcatttgttctccctgtgcctggcctcagactggtacacagtggcgctaaataaatgttaggtgggttggagcaatgcatgctttttcccagagccctggagattcagaggggaggaagggctttgagtctgcagcaaggcctcgttcataactgacagcatccattccagttcctccaagaaatggaacttcccatcaggggcgcctgatggcatgtccagatccttgggggtaggctcctcgggcagtaaatccaggccacagcgacgggaattcccctgggtctcagggccacagaccacccctggagactgctcactacacacatgccacgggccagtcccgagggctcagacaggtgctgcgctgctgtggcctcatctccacgcacagggcgcagcgcctgttctcagtcgacccctcttccagcgcatctcagtttcctagcagcctggaggatgctgtgaagctgcttggccttgggctctgaggagctctccaaggccctctgtaggattctggaagtctgagagactgggagagtgaggtctgggaaccgtgggcagagacgcagggctcagggccttccgacattccatgggttcagctgacccacagacaatggactccgggaatcagggccccttggcatcaaactctcatgtgctgaccacaaccaggttgcaaggaccacttcctttggcttcatccagtgcccgcatctgagctggaaggatgtgggcagatctgtaggcagagatgagggtagagccatgttgagcactgccggcctggcaggtcacagctgtgggtcccagagactggagggagggcagagagggaggagggtgggtgccacttcacaggcacttctgagcagcgaggggcaccagggcgaggagagtaggtcccccacctaggctgtctggtaggggcagccccagtacacgcccaccttacacggcgcccgggcagagggggagctgccagcaggctccacatcaccccggccacacacctgaccttcagtagctctagatatttccaccagctccctccccgctccagacccagggggacactcagcctggagagtgtggtgggagatttcacgtgcaggagccaggggtgtcccccaaaacccccaggcctctgagggagaggcgaggaggggtcaagagaggcttcatccatcacagagctccgtctctccggcaaagagcaggactagagcttctggaatcctccagcagttgctagaaaatggagctccctgcgtttcattttctatttccatctattattcatttttatgcctttgccgttttgtctctcaagcccctttgtgtttaaacactgtcattttctccactcttctcaggagggtctgcgtgtctgattgatcctcggaagttctgaggtgatcaataaatcttttcattttatgacattcagacttttactgagttgaaaataacatcgaataacattttttattctatacggaggcacagacatgtatgtatatgatctatgtaggagcccctgtaaaagtcactttgtgttctattctcccagcccctggggcccccagctttctggcgttctcagaaataacctccaccacgctcaacgtgtcctggggcgagcctgcggcggccaacggcatcctgcagggctatcgggtggtgtacgagcccttggcccctgtacaaggtaagacccggggttggggagatgggagcgcgggccacaccagtgcccagccctctgcagtctacacagtgagccgcacctgaccgcttctgtgggccaggagccttctggcgcctgaagtggggggttttggaatctgagctggacggggctggagctgagtgcgaggggagcggggactcgcggggaaaggcctgtgaggaaaagctgagccaagaccagacctctgtgttctgagaccagaacggcactctccctctgaagccgtgtcatatatgcccttgatcctgtctctgtcacactcaagacattcctctcctattcctcccgagatgtttgtcctgtggtcgccgacagagaccacccagggttccacttgaagccacgcctcacaacacaggccttcggctaccctcagcatcctaggagggatgctggcatccccgtgtcttagcaccctggtgctcccctcgctcatccgtcccctcagcggacatctatgaagctcctgttctacatgctggaaaagccaagacatgctccagatgctggaatcgaggacctgggaaagccaggattttgactggcttgtttatcaggtccctggctttcctgcgtccaggcagttcctattccagggcagaggtaacacacaggtaattaaatcagcaaacaacagcccgagcgtgatcagtgctttggaggaaagagaggagggctaacacaagaggcttagggaagagaccggagtgacaagggcccggacacacaagaatcctggggaagatcttccgaagggaggatccgccaatctaggggcccacggtgggcagagcttgggtggtgctggtggctggagcttggtgagtggggtgcaggcactgcaggccacagcacacggggctatggcatatcccactggagagtgacacaggagcaggaggacctgacctccccaagaccaggatccctcgggcccaatcccccgtctcagtgtcacgatggaaagaagctatcgttcatctccacacttcctagatcaaccggaaacagcttccatagaagagcagggaaggtgttgccaacacagaggactttgaaagaggaaatgtcaggggcttgacagtgagtgacaggtgaaaacggaaggtggaatgcagatggctcggaggagaacgggtggcagagattctgtagaccagggagtgaggaggccggccggggctgtggcatcatcctacaggagagcggcgagaaggggaagggtgcgggggcaggggaggagggctcagatcaggggtgtgtattgaaggtggagctggtggggtactggcgtgaagtggaggaatgggggttgcgggcaggtggctctgccctgctgtgcatgtggctgctgctctgcacctgctgggtcagtgcacaccctgctcaggtatttgttcttgtttttgtttctgttttttttgagacggagtcttgctctgtctcccaggctgaagtgcagtggcacgatttctgctcactgcaagctccgcctcccgggttcgcaccattctcctgcctcagcctcccgagtagctgggactacaggcgcccaccaccacgcccagctaactttttgtatttttagtagagacagggtttcaccatgttagccaggatggtctcgatctcctaacctcgtgatccacctgcctcggcctcccaaagtgctgggattacaggcgtgagccaccgtgcccgacccctgcttaggtgttattccagtgccttctgtgtccctctctcctgccatccagacaccaatgtgtccaccaaagattccggtctgggaggcacgtctttcccaccacactggggtgaaatacaagtccagctgtctctgccttatggtccagggcaagtttccccctgtaatatacacagacagactgtaaaaattatagattatttaatgtctgcgaggaaaaaatacaacgagcacatcaaagaatatcggcgctccatttaaagccgtgataaaagtttcctttaaaaataagcacatttagatgaaacggagttgatttgatgaagaaaatttaagcactagttttttatttcactgaatctcagatgccattcactgtaagattcatcattattttatgaagtgctcagaaagaaaaaatgctcccaataaaccagagcccaatacttttgtatcatcaattctgagctgcatcccaaatcggagatgtgaaaatccgagaaagaaaaaaaaaatcacgtcttagacaatcgatggactttggtaaataacagtagaggtgagatgtgggcatggtttttgaaccagcagagagggcatgggagggacggggatttagtgtggccacttcgaggggcggccaggatctgttgtgaccttccgagtgcccagcacctgcctgggagccagggggcctggacgaggctgccttcgaggtcccacagcagaggcccagaagcaggcatgccatttgctcttgcttgtcctgcagggagaaacagtagagaattttggagacacacacgggttccatgagcctgtgttacaaatgccttttcaagggtcataaccaacgaggaccatttaaatgagaattgactgtgaaagcttcatagttctgattgacctgtgagtccttcctaatcaaaggcagctcaggttttcccattcttcctcaagtaagtgactggttctgctccccagtcttctgtgttaatggatttgcagaatctccgtggaaactccatggtgtgtgcctctgggcttctctcttgggctgctgctcttagtcttgtgagaaagtgcttcatgggctgggcgcaggggcctgtaatcccagcactttgggaggccgaggtgggcggatcacaaggtcaagagatcgagaccatcctggccaacatggtgaaaccccgtttctactaaaaatacaaaaattggctgggtgcagtggctcacacctgtaatcccagcactttgggaggacgaggcaagtggatcacgaggtcaggagttcaagaccagcctggccaagatggtgaaaccccatctctactaaaaatacaaaaaattagctgggcatggtggcacgcacctgtaatcccagctactccagaggctgaggcagaaaattgcttaatcctgggaggcggaggtggcagtgagccgagatcgcgccactgcactccagcttgggcgacagagcaagactccgtctcaaaaaaaaaaaaagaaaacaaaaattagctgggcatggtggcatgtgcctgtagtcccagttactcgggaggctgaggcaggagaatgggttgaacccgggaggtggaggctgcagtgagctgagatcgcaccactgcactccagcctggtgacagagcgagattctgtctcaaaaaaaaaaaaaccagtacttcattccaggcaaggccattccatgggtcattacccagtcagaagtgccgcacaggggcctcgatgtgttgggtcctcttctctctgcagtttcactcccctagaattgtttcttggcttctaccaaaccttccccctagcccagtctcccagacacaagaccctgcacatctggcttcccttgtgttttcagtgttgccgtttcttgttcgtttcatgacagtttttgcatcactgggaaactcaaagcattcggaagatttttagacaatcctttcagcatgtcccgcttacatgggcattctgtgttctcgctatacacaggcaccccccaggtataatcacagtgataggtgatgtttgttgagctcaagtcgggcactgtgctcagcacttaacatccgctatctccaaatcctcagaacggctctaccttgtggctgcagcttttcttctcctcccgcagacagagagattgggctcagagccacaaagacatttgcccaaggcctgcgttttgaaaataatgacgagggttgggatttgaacccaggtgttctgagtccagagccaaggcctaaactgctccatgatgggcagaaagcgtctggagcacttgtgtttctgaaagtaaatgtgaaggtgaacttcagagatggggcttgaggaggattcactaaagcgttttatattctagacaaaccgctggctgcacagccgagtagggggcctgtctctcccctggatggcaaaaggtggagtcactttagtcacaaccgttttcgcctcttttcacaaatagcaagaccgtccgtcaccagccttgtctcttttgtctgttgcgaagggctggttccttcatcctggattttcctggctttgcaaccgaggcaatgtgctctgagattagagcgagaggggagcagcactgtcttgctttgcagctccttccttggctctgcaggctgaggggcggccaggatctcagcagaaaaagctccatcaggcctccccgggtgtcaggaagaacaagccatgcagaccccccacgtttgggcttgctgggggcttgggcacgttccagacttcggattcctgcacatcagtcaagcagcggatccaggtgtggattgcccagcggtgctggtgacatgaggcgtccagcccccacccaatggccttatagagcttcctctagacatgacacctggctctgactaagccatggggcccccgccggggtctttcccgccacaacaccgtcagtctgcaggcaccatcatccgtggtccggctccagccgggatgagcctgagtctggctataggttccagatccctcctggcttctccctcgggcaggactcagcaaccctgccccccagtgccacccaggtggacctcatggctgcctggggaaggccctcctcaccacaaatgccagcagagcctcgggaccctggcgctcgcctgcctcccctgatggtattggccagaaccctggctcgccgagacactaaccccaggcctgtccgacaagccacatcccgtacccacatacgccaaaagaagaacgtggaccaagagaggatggcagatcagactcactgagtcagcttatatctcatcgggggccagagcactggcatctgatgaagattcccaattggtgggtggtgaaggtggaggtggcagaggcggaggggcctatctctcccttctcctgagtccaggccttgggcggagtccccctacaccgactctgcgctgggccacgggattcgcttcagccagcgggacaatagctgtcatgaggcaagcagcttcaaaagcatttgcacgtgggaggcaccctggtcctcctgctgcccttggaacccaaccaccatgtgaacacacctgggctggcctgtggggtgacagtcacgcacggcccagcatgggagaggggccacctgggccagccaacccccagtgagactcaatgtgtgaccgcagacatgctgagtctagtgcaggccagcccggccaaaggactgccccgcggtacgggagctggtttggtggtggtggttttgagccactcggttttggagtggtttggttcacagccgtgcacgagagaggtacagcaggtgaggagtccatgttgattgtggagcacctattacttgatgcgttcttagacaatagtcagagttggggtcctgactatcggctgggcactcccactcatcccccctgccctgctccactcctcaccgtggtcctatgaggtaagcgctgccaacctcagagcagagggagaaactgaggactctgcagagaccacatgtcctgcccagcctcacacagggagcaagcagtgggcttcagaccactcccatccccgttcctgcattctctcttcctcccagctgactctgcagataccacaaccggccttggcaggaacgtggttcaggaagcactcatcctggcagctgctctctgcctgcaggcatttctgagtgtcttggcctcctgaggctggggaagggaggacgtgaactctctgttgaatgtgggaggatgccgggatagcttgaaaaggacgacaacgccacacgatggagtgtggccaagggcagggtggttgacagaaggcaacgactgggaaaaagcaaagcagcttcgtgcaccccgtggaggttacaccatccagccctcactgccctgcacctccacacccagactggccccgccccacggccgctgctcccactctcacccggaggggctgcactcccgtctgctcctccccgaggcccctaggagacaactgtgcctgcgtgggggactctgaaaaatccagactctaaccctttcactattgcatcaggattcccaacggggaaccacaaaagcggtaactggacctccacatgactttcaatattttgctcatggagtctgtgcgtgtcccagggaaacagttgcaaacgcagtgaaacatcaggcatccttgaagtatattgtgatgacaaaatattttaaaatatggtaaagatagttaaaaagtaaacagtgatctcacctggtaggggatctgtggggtcttctgacctctttccacacctcctcacccagaaccaggtctgtgcctgacatctgcaaactcttggctgggcattgaccagtcgggccaaggcaaatagagggtacagcatttacccggtatgggcagctcctctagtcactccactgtgaacacagtcgtggctcatcctgtgtgctgggcagagcccagggccatccccagccatccccgtcactctagggaacactcctcgaacccctgggacatcacattgtccagagcaccaggccacccggagcaccacaccacccggagcaccaggccacccggagcaccacaccacccggagcaccaggccacccggagcaccacaccacccggagcaccaggccacccggagcaccacaccacccggagcaccaggccacccggagcaccacaccacccggagcaccaggccacccggagcaccacaccacccggagcaccacaccccccggagcaccctgccacccggagcaccaggccacccagagcaccaggccacctggagcaccaggccacccggagaaccacaccacccggagcaccaggccacccggagaaccacactacctggagaaccaggccacccggagcaccaggccacccggagaaccacgccacccggagaaccaggccacccggagcaccaggccacccggagcaccacaccacccggagcaccaggccacccggagcaccaggccactcggagaaccacaccacccggagcaccacaccacccggagcaccaggccacccggagcaccacaccacccggagcaccacaccacccggagcaccacaccacccggagcaccaggccacccggagaaccacaccacccggagcaccacgccacccggagcaccaggccacccggagaaccacaccacccggagcaccaggccacctggagcaccaggccacttgagcactcagccatgtgcttgggaatccgattttatggcagagctatttttacattttttaaaatgtttttaatggtggtggtttatgggattgtaccctgaggctttgtagtgctgggcatggtttaaaaattgattaaataaataaaattctgacacacctgaaatggggagaaggccaggctggctctgcctcctgtgggatagaatttacaaaatctgtacctgggtttgtttttgctccagggagaaggaaggcatttttaacaatgaaaaaaaaagttgctctctagaatcactttacattggacaggacccagtttgtgtgttgatgacagtcactatgtgcacaaactgccatcctcatcacctctctgagcaatggaaggtcagtgctcacacatgccccattcctctacaggaaaacccagttttggagggtcacccaaaagtagccaaaattggccccaggcacggtggctcatgtctgtaattccagcacgttgggaggccgaggtgggcagatcacttgaggtcaggagtttaagaccagccgggccaacatggtgaaactaaaaatacaaaaattagccaggcatggtggcatgcgcctgtaatcccagctactcatgaggctaaggcaggagaatcgcttgaactcaggaggtggaggttgcagtgagctgggatcgcaccactgcactccagcctggatgacagagcgagactccgtctcaaaaaaaaaaagccaaaattgctctgaaataattcggaagaaaataatttagctgaatatatgtttgataaaaggcataatatatgaaaacactgaaccagctagaagatatgttggagatttttaggataagagaaatttgctttgatggctttgaaagatggacccgttttgtagtaggaaggcgctttgttctgttctgaagtggagatgactggggtattccaggtgctgactagcagcgcacgaccctcccgcaccaaggcagccatttcttagggctgacagcaggagggcagggctgggcaggtggactcaggacggtgggtgccactcaccaagggcagctcttctcagggatgctccttggaaaatgagctctgccaatcggtccatcctggaagtaccacaccttgatatcctcctccaagagctgcctggtggagattaatctattgaaagttctgagaagtccagcagttgagaacttatctaactgtttttttttttaatgcatcattttcaaacttgtttaaccaaagaacttgatttttccttctggaaaatgctgcatatgtgtaattttcaatatttattctctcccctaaaatgtgaaatctccattttctatttctaggtaatccaaccagcaagacttttgcatgatcacttgtttataacatcccataggtttgaggacgtttgtctctatgttgccatcgtcctctgaatcgaggcatcaatacttgcagtgaaattaattaattttttaaatcctggcttcagagtccacagatgaagttcttatgactcatttgaggcctgtaggccgcaagttggccaacccaggcaggctgcagcctcctcgtggggtctaactagatggagtatcttcctacatcttgtatacgctccctgtgttaatctgttctcacactgctaataaagacatacttgagactgggtaatttataaaggaaagagatttaatggactcacagttccacatggctggggaggcctcacaatcatagtggaaggcaaaggagaagcaaagtcacatcttacatggtggcaggcaagagagcatgtgcggagaacctcccatttataaaaccatcagatctcatgagacgtattcactaccacgagaacagaatgggagaaacagccctcatgattcaattatctcccccaggccccaccttgacaagtggggattattacaattcaaggtgagatttgggtggggcacagccaaaccctatcactcccctccctcgtgactatgtcaggaagcttgcagtcaccttacaagtgacaccagactttgcacagctcagagccaagtgggaagggacattccctggagtgtccaacctggagaatggcaggaccgccccccttcccccgcccccgctcctccctcccctccccgctcctccttcatatcattcctgagacggcagcctcccccttttgtgttgtcagcctcagttgttttctttgtcagcacccacttaccaagcttaagctctaattacacttatctgtgctgaaaattggctattaccaccatataaactcctaatagtaagaaatacttccttagcaaactgcagggaccactttccttgttatcgcaacagaacagacagtggacagttgcttctccaggctgaacccccttgtttcctttgcttctggcggctgcaggggtgagcaaggtggtgaccgtggaagtgagagggaactggcagcgctggctgaaggtgcgggacctcaccaagggagtgacctatttcttccgtgtccaagcgcggaccatcacctacgggcccgagctccaagccaatatcacagccgggccagccgagggtaagtggaactccaggggcagacaatgtcaattgcaactttagcctcccgcctcctgcttcactgagctgagatccatctacatggtcaacaaggtgatgttggcggccaagagctggcatcaac

SEQ ID NO: 760 - DNA, 3222 bp, Homo sapiens
atgctctccatgcttgcagccggccttctctgtgtcccttgggtcccccagagccacacggccacacgaaaccagagtttgcttgtgatggggctgcagagatctccaaagatgagctccagggctctcctggtgggagctatcggcgacgaggaggagtgggtcaccctctatgaagaggagaatgagcctgatgcccagatgctggagatcccaaacctcacaccctacactcactacagatttcgaatgaagcaagtgaacattgttgggccgagcccctacagtccgtcttcccgggtcatccagaccctgcaggccccacccgacgtggctccaaccagcgtcacggtccgtactgccagtgagaccagcctgcggcttcgctgggtgcccctgccggattctcagtacaacgggaaccccgagtccgtgggctacaggattaagtactggcgctcagacctccagtcctcagcagtggcccaagtcgtcagtgaccggctggagagagaattcaccatcgaggagctggaggagtggatggaatacgagctgcagatgcaggccttcaacgccgtcggggctgggccgtggagcgaggtggtgcggggccggacgcgggagtcagttccttcagccgcccctgagaacgtgtcagccgaggctgtcagctcgacccagattttactgacatggacatccgtgccggaacaggaccagaatgggctcatactgggctacaagatcctgttccgggccaaagacctggatcccgagcccaggagccacatcgtgcgagggaaccacacgcagtcggccctgctggcaggcctgcgcaagttcgtgctctacgagctccaggtgctggcgttcacccgcatcgggaacggggtccccagcacgcccctcatcctggagcgcaccaaagacgatgccccaggcccaccagtgaggctcgtgttccccgaagtgagactcacctccgtgcggatagtgtggcaacctccggaggagcccaacggcatcatcctggggtaccagattgcctaccgcctggccagcagcagcccccacaccttcaccaccgtggaggtcggcgccacagtgaggcagttcacagccaccgacctggccccggagtccgcatacatcttcaggctgtccgccaagacgaggcagggctggggggagccactggaggccaccgtcatcaccaccgagaagagagagcggccggcaccccccagagagctcctggtgccccaggcagaagtgaccgcacgcagcctccggctccagtgggtcccgggcagcgacggggcctcccccatccggtacttcaccatgcaggtgcgagagctgcctcggggtgagtggcagacctactcctcgtccatcagccatgaggccacagcatgcgtcgttgacagactgaggcccttcacctcctacaagctgcgcctgaaagccaccaacgacattggggacagtgacttcagttcagagacagaggcggtgaccacgctgcaggatgttccaggagagcccccgggatctgtctcagcgacgccacacaccacgtcctctgtcctgatacagtggcagagctggctgaaggcctctgcagtcttccttctgaggtaccagttcctcgagctgccgcagggcagctcaaacgccattccctgcagttatcctccagttcttcctggcagtgagctcgccgtctctgaggcttcagagccgccttcctcactcagtctctggcacccggtgcactatagctcaggagatctcctagatgcaatgagacggcaaggctggaatatattccccaaggggcggagctcagtgtttgcgtgcattcctccagtaacatgccctgagctcttgcctccgagggacgaaagcctgaacggccttcttcagggatacaggatctactacagggagctggagtatgaagccgggtcaggcaccgaggccaagacgctcaaaaaccctatagctttacgtgctgagctcacagcccaaagcagcttcaagacggtgaacagcagctccacatcgacgatgtgtgaactaacacatttaaagaagtaccggcgctatgaagtaataatgaccgcctataacatcatcggcgagagcccagccagcgcgcccgtggaggtctttgtcggcgaggctgggatggacctggctgtagaggagcccattgagggccatggtggggccaccaagggtgctgtcagagaggggtgccagggtgccgtcagtaaagggtgggtgccactgcggacggcggccatggcagattctgtgctctccagttgtattcgggtgactgggccccagttggcccccatggctgggggccctcccccgccgcagtcacggtcgccacgctggcagccagtggaggcctttcttcagcacccacttgctcagcaacttgctggcaccgaagggagcgagagagccctgaggtacgggcctgcccttcagctgctcccccgaagcagtggtcagaacctactgccagttcccactgcacccctgacagctgtagggttaaaggatggggacaaagtcacaagggtgttggctgggacacctgggccagccccggccatggccccgcagaacgtgcaggtgaccccactcacggccagccagctggaggtcacgtgggacccaccacccccggagagccagaatgggaacatccaaggctacaaggcaaggccctcccgtgcgatttactactgggaggcagacagccagaacgaaacggagaaaatgaaggtcctcttcctccccgagcccgtggtgaggctgaagaacctgaccagccataccaagtacctggtcagcatatcagccttcaacgccgccggagatggacctaagagtgacccccagcaggggcgcacccaccaggccgcccctggggcccccagctttctggcgttctcagaaataacctccaccacgctcaacgtgtcctggggcgagcctgcggcggccaacggcatcctgcagggctatcgggtggtgtacgagcccttggcccctgtacaaggagccttctggcgcctgaagtggggggttttggaatctgagctggacggggctggagctgagtgcgaggggagcggggactcgcggggaaaggcctgtgaggaaaagctgagccaagaccagacctctgtgttc

SEQ ID NO: 761 - protein, 1068 aa, Homo sapiens
MLSMLAAGLLCVPWVPQSHTATRNQSLLVMGLQRSPKMSSRALLVGAIGDEEEWVTLYEEENEPDAQMLEIPNLTPYTHYRFRMKQVNIVGPSPYSPSSRVIQTLQAPPDVAPTSVTVRTASETSLRLRWVPLPDSQYNGNPESVGYRIKYWRSDLQSSAVAQVVSDRLEREFTIEELEEWMEYELQMQAFNAVGAGPWSEVVRGRTRESVPSAAPENVSAEAVSSTQILLTWTSVPEQDQNGLILGYKILFRAKDLDPEPRSHIVRGNHTQSALLAGLRKFVLYELQVLAFTRIGNGVPSTPLIRTKDDAPGPPVRLVFPEVRLTSVRIVWQPPEEPNGIILGYQIAYRLASSSPHTFTTVEVGATVRQFTATDLAPESAYIFRLSAKTRQGWGEPLEATVITTEKRERPAPPRELLVPQAEVTARSLRLQWVPGSDGDIRYFTMQVRELPRGEWQTYSSSISHEATACVVDRLRPFTSYKLRLKATNDIGDSDFSSETEAVTTLQDVPGEPPGSVSATPHTTSSVLIQWQSWLKASAVFLLRYQFLELPQGSSNAIPCSYPPVLPGSELAVSEASEPPSSLSLWHPVHYSSGDLLDAMRRQGWNIFPKGRSSVFACIPPVTCPELLPPRDESLNGLLQGYRIYYRELEYEAGSGTEAKTLKNPIALRAELTAQSSFKTVNSSSTSTMCELTHLKKYRRYEVIMTAYNIIGESPASAPVEVFVGEAGMDLAVEEPIEGHGGATKGAVREGCQGAVSKGWVPLRTAAMADSVLSSCIRVTGPQLAPMAGGPPPPQSRSPRWQPVEAFLQHPLAQQLAGTEGSALRYGPALQLLPRSSGQNLLPVPTAPLTAVGLKDGDKVTRVLAGTPGPAPAMAPQNVQVTPLTASQLEVTWDPPPPESQNGNIQGYKARPSRAIYYWEADSQNETEKMKVLFLPEPVVRLKNLTSHTKYLVSISAFNAAGDGPKSDPQQGRTHQAAPGAPSFLAFSEITSTTLNVSWGEPAAANGILQGYRVVYEPLAPVQGAFWRLKWGVLESELDGAGAECEGSGDSRGKACEEKLSQDQTSVF

SEQ ID NO: 762 - DNA, 29559 bp, Mus musculus
  misc_feature (1)...(29559): n = A,T,C or G
gccattcctgggatggtggttctgggttctataagaaaccaggatgaagccgggcgtggtggcgcacacctttaatcccagcactcgggaggcagagacaggcggatttctgagttcgaggccagcctggtctaaactttttcctttttttaatatttattaatttattttatgtatatgagtacactgtagctgtctccagatacaccagaagagggcatcatatctcattacagatggttgtgagccatcatgtggttgctgggatttgaactcaggacctctggaagagtagttggcgctcttaaccctgagccatctctccagcccccagcctggtctaaaaagtgagttccaggacagccagggctatacagagaaaccctgtctcgaaaaaacaaaacaaaaaacaaaaacaaaaaacaaaaaacaaaacaaacaaacaaccaggataagcaagaaagcaaaccagtaagcagcaagcacccttctgtggactctgcaccagtgccttcctccaggagcctgccctgtttgaattcctgacctgacttcttctataaagaacagcaatgtggaagtgtcagacaaataaactctttcccccagacttgctttttttggttatgccgttttgttgcagcaatagaaaccttaaccaaagcacagcactagagcccaggcaggttccctcacccaacacaacacctatctggggctgtagagatggttcagccaagagagcttgctgctttttcagagaccctaggtttggttctcagtactcaggaatgtctcacaatcacctgaaactttagcttcaaggattaacaccctcttctggcttctttggcctatattcatgtggcacacacaaaaagaaataaaaacagattttttttttttttaattgcaccttttcagatcccttgtcggggccaaaggtgtattgggttctgggctctgttaaggtctatacagtcactaccttgggagatggtatataagatctgcttgagatctggagtaggtcatcagagacttagggcaaggaggagaagagagagagagagagagagagagagagagagagagagagagagagagagagagtcatagctgccaaacctatccaaggtaaactggagggaagccatacttccaggagcccaagtgtccagatgtccagatgcacttggcgaaggcaggagtctcaggaagacattcaaactattgcacagatgagagcacaggaccagactctaggaaggtccagagagaaagaggaaggtcccctctttctctgctgagcagtgcctaatattacgtcacatccccacagtcagattgaacaaatctgcaggaagaaaatgacatcactgcacagactaagtcttagggcatgctttcttcatgtcaaatatgtatgtgcttaacctgtgcagcagcccaatgagataggtcttagcatgcctgttttataggtagggaaactaaggcacagaggggtgactaccctgttccaaatcctgcatcaacaaagtgacggaaatgaggctctttcacgacaaaagcaaaaccgatggttactgagaatttctctgaggtttaagacacacatcttctgactctatgcagaagcaccagctatgacagagcaccagctcacatatgggtataacaatgatgtgggcatggtaacacacctttaattccagcactggggagagagaggcaggcagatttctgtgagtctaaggccagtacggtctacacagagttccagttcacccaggaccatgtaggaagatcttgcttaaaaaaaagtaaattttacggccaggcgtggtggcacaagcctttaatcccagcacttggtaggcagaggcagacggatttctgagttccaagccagcctggtctacaaagtgagttccaggacagccagggctatacagagaaaccctgtctcgaaaaaccaaaagataaaataaataaataaaatttaaaaattggtcgggcagtggtggtgcatgcctttagtcccagcacttgggaggcagaggcaggaggatttctgagttcaagaccagcctgttctacagagtgagttccaggacagccagggctatacagagaaaccctgtctagaaaaaccaaaaaccaaacaaacaaaaaaaccccaaaaccaaaaaccaaacaaacaaaacaacaaaaattgttatttaggggctggagagatggctcagtggttaagagcactgactgttcttccagaggtcctgagttcaattcccagcaaccacatggggctcacaaccatctgtaannnnnnnnnnnnnnnnnnnnnnnnnnnnnnnnnnnnnnnnnnnnnnnnnnnnnnnnnnnnnnnnnnnnnnnnnnnnnnnnnnnnnnnnnnnnnnnnnnnnnnnnnnnnnnnnnnnnctcctcctcctcctcctcctcctccttctcttcttcttcttcttcttcttcttcttcttcttcttcttcttcttcttcttcttcttcttcttcttcttcttcttcttcgtgtgttttggtttctttgaggcagggtttctctgtgtggtcttggctgtcctggaactccctctgtagaccaagctggccttgaactcagagatccacccgcctctgcctctccagtgctaggatttaaaggcttgcgcctccgcacctggtgcctttgaacttctcacccttctgcctctatctcctgaattctggaattacaggcatgtgccagcatgtgggttacttatggggtactggggtcaaatgctgccaaactttgtacacactagacaaatgctgtggtagctgagctccagtaccctcacattctatcttctcctctcctgcctcttctccataaagagcttttcctggtcacctgggatggagccacaactctgtccacagaggcaggcaaattattctactgcattgttctgtttgtggctggcaagtggcccttaaggttggtcctaggtccttttgataagactcaggagcctgagggtttgtggggaaaatagatgccacagagtgttgcattttctctagaccagccagccccggctgggactcagggactctgacagagctcctgtgtgcttcccacccgacaccctctgggggacagttcctgttctatggatcttgctgtgtgacaggagtcattttcttttccctttttgagtcagacactttgttacaacagtggagaactggattctaccttcccatgagggtgtgatatccaagtcttcctgcggctagtaactgcctccctcccatgtagccaggagcctctgaagtagggataccacactggacaatgagtctgtgtgacacctgggggccggtgacctgtggtcctgttaggagtcttggagggggctattttccagcccaccctgggtgccaggacccaatctcctgactggactcattagaccttgggggtcaaagttccttctcagggagaagggtttgtgttggcttttaacaagatcagctcagacgctactgaatttgatacattttgtcttcgttttaagtttagttttactttgtgtcaaagtttacctagtttaattccagagtagtggcccacgaggaaaaggcaggtggatttctgtgagttgaaggccatcctagtctacacagtgagttctaggtctgccagggccacacagagaaatcttgtctcaaacaaacaaacaaacaaacaaacaaacaaaacggataaaatatttctgtaaggctaaggtttcctgtgaaaaaataacagaccttctcggtccttttcatccagtcttccgtctcagcacctgttttcagttatctgcttctgtgtctctgaataacttcccctgtaatgtcttctgattttttacattgtagacagaaattttctggatagctttttgtttctttgtttctttatttttgtccccgactcccaccccaggcagtgtgttgagtcatctctccagccctattgacactttcttgagtgacttccagtcaggcattttgtcacagccaggatttctctgtccagccctggctgtcctggaactcaagattcacctacctactcagagatttaccttttgagtgctgggtttccatggtggctctaaatcccgtcaaaatgacaagattaatcattaacactttatgtgcattgctgctttgcctgcatgtatgtctgaatgaggtgtctgatcccctaaaactgcaattaaagctgtgagctgccatgtggttgctgggaattgaacccaggtcctcttaactgctgagccatctctccagctctattaacactttcttgagttacttccatcaggcattttgtcacagtgttgggaagctaatatacactctgtgatgatttgtttccgtgaagattttagaatggaaattatttttcccataggatttgaaggcatcattcccttatctgtgtttccagagtcataattaagaagccttaaggcattttgatgtcagaatctttgtgtatgccttatttcatctttctgaaaattcacagaatattcttagtctttacttttctggaacttcataccttagtgtgaaatagtaataatagctgttattattattatttattatcattattattttgttttgtcgagaatttctctgtgtagccttgggtatcctgaagctcactctgtagatcaggttggcctcaacctcagagatcttcctgcttctgcctctggagtgctgggatcaaaggcatatgctaccaccacctgtctgtgaaattattatttttttaatcttgttcttggtactcactgggtcctttcagtttggaaatttaagttattgacttctgggaattgtattgaattacatcactggtaatttacctccctctattttctctgttctctgtttttagaactctggcatatgactgttggccttcctagattggtcattaatttttttttaatcttttccctttgatttttttttctttcatccttctcaactactttcctggaaattggggggggtggtccatttgattgttgattaatacatacctttcaaaaaagttttatttatttactttatgtatatggagtgttttgtctgcatatctatgaatcatgtgcacacgtggtgccccagagaccagaagagggtgtcaaatcccctgggattggaattacagagttgtggttacaagttgttgtgagttgtgagccattatgtgggtgcagggaatttgaacctaggtttttctgggaaagcagcaagtgctcttaaccattgagccatctttcccagtacccccagccccaccccagccccagccccacccacctctttttcccctctccnnnnnnnnnnnnnnnnnnnnttcccctccctctcctttctctctcaccagaattcagagctccttcctgcctctgtctctctggagtgctgggactaaaggtgtgtgacaccacacccagtttctatgtttttttttttaagatttatttatttattattatatctaagtacactgtagctgtcttcagatgcaccagaagagggcgtctgatctcattacggatggttgtgagccaccatgtggttgctgggatttgaactcaggaccttcggaagagcagtcagtgctcttaactactgagccatctctccagccccagtttctatttttaatgtctcaagagttcttcttcattcttcaacacagtcacacatgtttgcatcctctttgtgactctagacacagctccatcctttccggcactgggaaagttagggaatttatttcttccttgtgttttctccacttgactgtttttgcctgctccctttaatggtaacacatgttcgtttggatgttttatgacccttggctttctgaactggagtctgtggcccatgagtacggctcggctgggtcagtgagggcctgcacagggttatctggctgggctgtccctctggagaacagttccagattcctcagatgttgtccctgtgatggtcgtgatctccaaagaagttgctttctgtgtgcggcctggaggaagaaggcctaacatctggtattctgccacaagagaagatagatgcttagaatgggtttgtgcctttctctgtcaggggttaggctgttatataggagggctgagtcagtcacttttgggtcactgtgactaaatacgcaatagaaacaacttgtggaagggaagatttcttttggttgatggtcaaagagttgtagtccatcctaacaggagaggtgagacatagtgagtggctcaggcatggcagtgggataggaggcaatgcctgtttacattggactaggaagcagagcgagcaggcacagttaaggggtacaccccctagtattctactactgccagacagaccccaatttctaaaggttccacaaccttcagggaccaagcactcaaacagagagcctatgggaaacaatttagattcaaaaggtgtcctttgtnnnnnnnnnnnnnnnnnnnnnnnnnnnnnnnnnnnnnnnnnnnnnnnnnnnnnnnnnnnnnnnnnnnnnnnnnnnnnnnnnnnnnnnnnnnnnnnnnnnnnnnnnnnnnnnnnnnnnnnnnnnnnnnnnnnnnnnnnnnnnnnnnnnnnnnnnnnnnnnnnnnnnnnnnnnnnnnnnnnnnnnnnnnnnnnnnnnnnnnnnnnnnnnnnnnnnnnnnnnnnnnnnnnnnnnnnnnnnnnnnnnnnnnnnnnnnnnnnnnnnnnnnnnnntgcttggctgtgtcttaattaccgttcaattgctgtgaagaaacatcataaccaagaaaactctaaagaaagtatgtagccgagtgtggtggcacacgcctttaatcccagcactcgggaggtagaggcaggaggatttctgagttcgaggcccgcctggtctacaaagtgagttccaggacagccagggctatacagagaaaccctctctcgaaaaaccaaaaaaaaaaaataaataaataaataaataaataaaaaaaagaaagaaagaaagaaagtatgtattgtaggcttgcttacagatttagagggttggtccatgagcatcatggcaagaagcagagagtgaaagtgtgttagtgctggagcagcagctgagggctttatatagatatatttttttaagatttacttatttattttatgtatatgagtacactgaagctctcagacacaccagaagagggcattgggtcccattacagatggttgtaagctaccatgtagttgctgagaattgaactcaggacctctagaagagcagtcagtgctcttaatcactgagccatctctccagcccccagggctttatatcttaatctgaagacagcaggcagagagagagacagagacagagacagagagacagagacagagagaatggacttggtgtgggtctttgaaacttcaaagctcatacccagtgaatacctactccaacaaagtcacaccccctaatccttctcaaacagttctactgtctggtaactaagcattcaaatatatgagtctatgggcacaggccattctcattcaaaccatctcagctcatacaaggggaacgcagggaaacactctgcttaccactttatcctaaaagagccacatgcagaggtaagcggtacatgacctgaggtatgtgaaataggcctctggcgcaggaacttctgttgtagtgttggccgtgctgcactcttgaagtatgaaagatattcagaccctgtccgctggggtttttatagaagttctgtatatgaaaatatgattaagttactttgtaatgtgattatgctcaatcttcgtctctttcccctgaaaagagttccagtcctcatcctctcatcaaatggtcggtcgttctggcaacacgcctccatcctaatttacatataacaatatcctctgggctgtggggggtgtagatcagttggtagagtatttgtctatcacatcatgaaggaagccctgggttcagttgttgtagggaactttgtgaaataagcactctgataccaatgagagtggaagagagatgatgtcaccagtggaacagagatgatgtcaccagtggaccaaagccagtacagctcttcaaagcctttgatactgggtccagtttgtgttctctcattttatgctctttggttacacaatcacaggattttggactggtgagatggctcagtgggtaagagcacccgactgctcttccgaaggtccggagttcaaatcccagcaaccacatggtggctcacaaccatctgtaacaagatctgactccctcttctggagtgtctgaagacagctacagtgtacttacatataataaataaataaatcttaaaaaaaaagacaggatttcttttttttctttcttttgttgttgagatatatatatgtgtgtgtgtgtgtgtgtgtatgtatatatactgtagctgtcttcagacataccagaagaggacattggattccattccagatggttgtgagccaccatgtggttgctgggaattgaactcatgtctatcctggaattcattctgtagaccaggctggtcttgaactcacatagattctccagggattaaagcaccaccagctggctcttattttatgctcttgaaccacaaggtgcgttgggaagcaaacaaacaagattttacagaagtgcacatggcagtgagcaggttgttagggagcgaataggcagtataaacagtgttttacataaatcaataaataagtcaataaattaatatctaataataataataattggccttttctatcttattctatttcacagtccccagcattgcataaacttggtgtggtggtgcaggtgtataatcccagcactcaggaggtggagggaggaagatcagaagttcaaacccatccttaactacttagtgagtttgaggccagcctgggctacctgagaccctctctaaaacaacaacaaaatgcccttgccactccagatcccaaggccttagtgattcttttgtcagagaccaagtgcagagactgaagatctttctggctaggtcccagtgtaggcacagatatggatgatgaaatcttgtcaacacagtgaaatctctatggcgcccttttccagcctctatttcctcactccctgtcatactgacactacacagtctgagccctgggaagcagaagagaatggctaaaaatctgggctccaaccatctctgcttgcatgtatgagcctgggcacacgcagcctctctctctacaccacagtgtgagcctgggcacacacagcctctctacaccagtttccacttgaaacacgggagaaggcacactcctctgagacactgtaaagatcctataaagcatgaccagttatgatttgatcacagttagtctatgatgataagtgtcagcacaagggccttcacacacgaacactgtgtagataggagcataggggacatcagaccagagagagggggacttgtctaagcctctttcatccttcatttattcatagatgaggggtagtgggggtgggggtgggtagacaaaggcactttctgcttcaaaaataattccttccctggggaaagtgcctgcttctagaaccgtccaaagagcctgatgaatccagaagtctgcctagaaacaagtgatgatagccctggccagccaatgggatcatgcaggcctttctacctgtttagggaactcccccttcatcctgcccagggaggcagctttgagtgagtggggaatttccagatttgtggctttcagttccacatctaccatgtgggcggagtgacctgctgtgggcgaatcagattccttccagtatcagctttaagaggtgatcttggggctcaagggtcccagacacacagcagcagcagcagcagcagcagcagcaacagcagcagcagcagcagcgcctgtgggaaaaactagaggctagagccatggatgaccaacgcgacctcatctctaaccatgaacagttgcccatactgggcaaccgccctagagagccagaaaggtatgtgtgaataccagcagagagcccttacctctggaggacacagaatgcaggcctggggagggacacagagctctgttgcaggaaggttgccttgagtgaccttgagcgctgattttctgagtgaattttatttatttatttatttatttatttatttatttatttattttgagatagggtttctctatatcaaaatatagagaatgccggggattctacataatgaaacataatgaaactcattttatagaccaggctggccttgaactacctgcctcttcctcccaagagctgggatcagaggcaagtgttaccacatttggctctgagtaatcttgccctcctcccctccaacctgccaagggtactgacttcccctctgtaaaccaagggcctcctttaggacttgtgttaagagagccctggatttgagtttcaccatacaagtaagggctttcacagatcctctgaagctgggccataactctaggtcagaagacttaagaccatagtgttcccccttgaatctgttctcccttgtcttcagtaagtctgtttgatttcctagcctctaatctggaaaagggttcccatgccaacagcctcagaacccatttctgaggacagtagaagtgactcctcattgtcttccttaactgctagaagacgtgtatgagcccaggcaagcagggcctcaccagaccggagtccacacctgacacgggatgagcctttctgtatgtgtgtaggggaagagagctgcctgccatcccaaaagctgctcacagagatggagttcctggcccattgttacatgttgcatagctatccagatagctgggctcctctcgcggtccctaaatgacctcagccttacactcctaacccccccccccaaaaaaaaaccaaacagggttagaatttgcttgccttcttgccttgttcccccaacccccaagctgcctatttgcttgcctatggggaactaaaaccagatgtgacgtcagcagtctccaggcagaaagaggttttgaaagagactctgggagattgaccacgaatggcattctagcaagaaggtaaccagatatggattcttagagcaatggggaattctgaagtaacttttactgctgtcatgggtgaccacagaaaaaccacagcctcttttttgggtcccactgcttaacagcaatggctataagaactgttcatctattgggttccttctaccggtcctcagacgacattgatcatcacgataatgataaacaaactacagattctatcttaattcctacagttactgtagctaggagttgggcatttttgttatctccctctgcctgtgcctttttttttaaggctagttttactatgtagttgggctggaattcacggagtagaccaagctacttggccttgagctaagagaaacttaacttctcctgagtgttgggattaaaagtgtgtgccactatggctggcattattattacacagaaggaatttgagctcatctagtaattaacttccaggttatctcagctgctgagtgttgggcatagcatttgagtcaggaccagtctgagtcctgtctgggtcctgtagaggcctcatttgtggagcgaggaggtaggagccctctgacctcaggcctctcattgagggctgtgtattcaacaaatccatgacaatcttcactttacttcagttactgcttccaagactgaccaggccttaaggtccagggccattccctacaggtttgatttggggcatttttgtgaacacttctgcctggcaacatgtgcgtcatgattcctgacggctctggttggtttctgacttaagtcaatttttttttttttaaacacaaggaggaagtacaaaggaggaagtaaaaccaggaggtggcaagagttggcactcaatcagaaccaagacccagccaacctagaggcagtaagaggctgggtgtggttgtgtatgcctagaatccagcatttgggaggtggaggcaggaggatcaggggttcaaggccagactcatctacatgagaccatctcagaaaaacaaaataatattaaattgaataaaagtggaaggagagatgatgctgggcttgacatccagcctcctggagggcagcattgttatggatagtgaccttcctgagagcagtattactggtagaggaaatgtgtgtccggtgtggggccaagtgtttcatctcttcgttatttatgtttcatctcttcgttatttaacaaccgctcattccaagccctaacctggtccacacgcagaagtgtcttgttcctggccccagagttaggcaagccaggatgccagttatggctactgttcacatcttcaatacaaacctgtgttcactggccttctgaaaggttgaagttcgaaaggagagggacgtggctaccccaagctcatgtggtagcaggtagagctgggactagatctgaatatggggtggtagaggggttcgggggttccatgagtcaccaaagtagatgaagcagaagaccttgagcccaggttccatcttccttcagaaggccaagaaatttaaacctattctccctcctgtctgatctcctttctccagcccttggcttaggaaatacagagggttggcaagccaatgagaattagctgtgtctgtgatgtcataagttaccaggcagacaggttttctggagtttcctaaattacccttcctggttgctggagtaggcaggatcgaaacttatcacgagcaatttcaatttcaatgtagctgctcttacttagctctgagctctgcgtactatactagcaaggccacagatgggtcattatataaataataataaatctggcagatttagccggacgtgctggcacacgcctttaatcccaggcactcggaggcagaggcaggcagatttctgagttcgaggccaggcctggtctacaaagtgagttccaggacaggccagggatataccccctacatacacaccacacaccactcatgcacacaccacaccacaccacaccacaccacaccatacacaaacaccacacacaccacatatacacatacacatgcacagcacacatgagtatacacgcacacacacacttgttggaggacagccaaattttaacactgtgggtttgagggttgctcacatgacatatgagagagctgggagactggggaagaagatctgtggagctaagccccccctcggaagtggggaagggggatttgatcttgtttttgctggcagaaaaagataggtgagtttactatgtaagaggaagaagggttttcatccactgtgccgtccccaatccccacggtgacgtcaggtttaaagagaaaagggaaggaagtgcggtaggggacagcaaaagccggatttatacctgaaaagagaagtgggggcctagagtttttacatgtggagcgggaggaacattgtcaggctgaagcagtgccagcagtgtgtgtgtacacacacacacacacacacacacacacacacatctccaagacaaccccctcacccccacccctgctccagagtccatctgtcccagagtccctggaaatctgaatagatctccagggtagaggggactcgggactcgggaggactttaccctgtcactacacagaggagacaccaaagcccagaggaggcaaggaacgtggctcatccttcccattgagcttgggccccaggtggatcttcctgggaggacacttgggggcggcaggagcagatgtcctcacttattgggagggtttgagtctgagagggcgtgggtccacttccaatcagcgtccagctctggagcatgctcttactccgtcccaacaggtgcagccgtggagctctgtacaccggtgtctctgtcctggtggctctgctcttggctgggnnnnnnnnnnnnnnnnnnnnactggggaagaagatctattaaatttccagggactctgggacagacggactctggagcaggggtgggggtgagggggttgtcttggagatgtgtgtgtgtgtgtgtgtgcacgcacacgtgcctggcactgcttcagcctgacaatgttcctcccgctccacatgtaaaaactctaggccccacttctccttttcaggtataaatccggcttttgctgtcccctaccgcacttccttcccttttctctttaaacctgacgtcaccgtggggattggggacggcacagtagatgaaaacccttcttcctcttacatagtaaactcacctatctttttctgccagcaaaaacaagatcaaatccccctccccacttccgaggggggcttagctcctcagatctctagggtagaggggactcggaaggaggaaggactttaccctgtcactacacagaggagacaccaaagcccagaggaggcaaggaacgtggctcatccttcccattgagcttgggccccaggtggatcttcctgggaaggacactggggggcggcaggagcagatgtcctcactattgggagggtttgagtctgagagggcgtgggtccgggcttacgtccccacttccagtcagcgtccagctctggatcatgctcttactccatcccaacaggtgcagccgtggagctctgtacaccggtgtttctgtcctggtggctctgctcttggctgggcaggccaccactgcttacttcctgtaccagcaacagggccgcctagacaagctgaccatcacctcccagaacctgcaactggagagccttcgcatgaagcttccgaaatgtgcgtgctccacctgtccctcacctcacagacatcatttctccatttagcccctcccgatctcccttcctcccccgcaccggtttttcaaatcttaacccctgggttccttactcccttggacctggactcatactgtcctccctgccccacagctgccaaacctgtgagccagatgcggatggctactcccttgctgatgcgtccaatgtccatggataacatgctccttggggtaaggaaggcggcaggaaggaaatggtagctggtgtttgccaagggggggggggctgaaggataacagttgtcaaggaatctgggcactaactactggcgaggagcagggcacacctcagagaggcttgcccaaggtgactgaggaggccagaactcttagggctcccctggtggggaaagggcaagtcccacaatttgcaaagtgcttcttcaccttagcatcctatagtcccccacttcctccaagtctttggctgcaaaaatgctgttactcataagattactattggtaccttatccagggcagagcacatcaatcgaacggtgccaaatggtcagtcctgaaaacatacataagttagcatgatacagacggggcaggtttaattaggactagtggtgtatatatatatagacatataatatatgcaagcaatgacaatgaatgaaaaaagaggccatgaatttgaagtgaagcaggaaggaacatatgggagggcttgggaggaggaagcaaactctgctattgggaaggctctgacaagcttctgcccgcctgaccagagagggcatagaggcaggaagggcgtgaggggctggcacttccatgttaggaggtggcagatttgagctgttgagtgcaagcacctgactcgtactagactatagctgctgatccctgcaatgctggtaaccctgttcccttccccacagcctgtgaagaacgttaccaagtacggcaacatgacccaggaccatgtgatgcatctgctcacggtgagtatcagagccagcgggtagtctcctgggtcacgtgggaccccggccctcactcatgggttaggctcactataaactcaacacatgcttagtccaaggaatacaaggtggtccttaactgttgcgtacagtccatcccctacccaccttgagataagagtctatgtagtcctggaaccgactatgtagaacaggttggctttgaactcacaatttgcctgcctctggctcccagtgctaggattaaaggcgtgcatcactaggccaggttccagccacctcacttttgaggagttaaaaattatggtccattgagactggagagatggctcagaggttaagagcaccacctactcttccagaggtcctgagttcaattcccaaccacctcatggtggctcgcaaccatctgtaatggggatccgatgtcctcttctggtgtgtctgaagacagagacagtgtgctcgcatacatgaaataaataaataaatcttttaaaaaaatcaaattaaggtccaatggattgacttggccacaataccatgttctccttcccaaattaatattgcacatgcttgcttcgtgtcaggcacagtgcatggcacatggctcttggcctacagcagggaacactggttgtgtgaggacaggcagaggacccagacagagggaaaaaactggaggtgctggttcagctcctgaccctgactggagttccatagctgggtgcccctcaccgctgctctccaacatggggaccaggggccaggcttggtgtggctaatgtccattcctcagaacgaaggcctgggaacatggggtgcacatctccccttatttattccgggggttctctataacttcccccttgccctgccgctctgcagaggtctggacccctggagtacccgcagctgaaggggaccttcccagagaatctgaagcatcttaagaactccatggatggcgtgaactggaaggtaaacagcccctgttggaatctcttcttcttcccacagtagcttcaggactagaaagaggcaaagggaggactagggctgctgttctcttgaagctactgagggccttctaacattcacgacacccctgtgggtctttaagaggcactgaggctgaagctggacccctccaagtttgtagtcaaggcagagtccagaagggtaggcggttgactcctgaccctgaccatccatccacctctgatctcgttagatcttcgagagctggatgaagcagtggctcttgtttgagatgagcaagaactccctggaggagaagaagcccaccgaggctccacctaaaggtaccaggacgggagcttcggcctgcctgtcacagtgacctactctctcagctcagtcttttctcgcctgttccttcagggttcggaaacccttatatcctatccgtgggtctgttctttcacacacatgtccagagtacagaggcctctaggctctctgtcttggagcaaaaccaactcaaaacgtacccggcaggagtccccccagcagtacataaacatacaaggaggagacggaatcagcacttgtccagatagagccctgggcacctctcacttcacggcagtgccagcatacaggaggctgaggcataaagcattggggaacgcctctgctttaccttggtgctgcctctaacttgctgtgcagtgctggacgagcccatcccactgggcttctgtgtcccacaagtggaaggctagaggcccatactgctctggacctcagtttctctgatatataaatcccttacatgctatctcaaccagcttctagctaatgtttgaatcccctctccagcgtccccaacaagtggcagcccccatttctactttatcccagtaaaggaaggtcagattcccagaggtgtccccattactgtccccctgaaaccagaatcaaactgtaacaaaatccagaataattattcactggggcaaatgacacctataagtcatgctttctctttttggatcttactggtttcagactcaggcctcagttttctcatctaggctatgggtctaccccataaggaaagcaatttggataggcattaagcccatggcagtggtgtgtgtgtgtgtgtgggtctctgctctgctgagatcctggcccagagtccacccactcactgtcttcatcatgccttcagtactgaccaagtgccaggaagaagtcagccacatccctgccgtctacccgggtgcgttccgtcccaagtgcgacgagaacggtaactatttgccactccagtgccacgggagcactggctactgctggtgtgtgttccccaacggcactgaggttcctcacaccaagagccgcgggcgccataactgcagtggtaagcaggggacaccgtgtcacataatctaaaggactaggaagctctaggaaggccaagggtccaaaggtccctcccagtatacatggggtcaggacatgggttggctgtgccctgggagcatccaccatcagtcacacacacaccagcccctttctccacacaggaactccttgtgtccttctaatctttgtctcttcttctccgcacgctgtcctgcactggagtcccacagacccaccagtctcactgtatccccaaccacactgtatgctctggtgcctcctttgccaagttcaaggcacagtggcaacagtgtgtgtgtgtgtgtgttggggtaagaataacagtgagcctgatgcttcccttgcagagccactggacatggaagacctatcttctggcctgggagtgaccaggcaggaactgggtcaaggtaagggggggatcacagagggggccacccacatgcagactctggtgacactgggacattcatcactatcactgggatggtttttctagaatgggatggtggctgggagcacagtactacctgagcttagcagggggacagactgatctgcagttccaagatgttgggcagaggaggcagggacaacaaactggtggcccagctgtatcaacctgtgcttctcttcccagtcaccctgtgaagacagaggccagctctgcacagcagcagcgccccctgctctcctgtgcctcagcccttcttatgttccctgatgtcacaccccacttcccgtctccctgcaccctggggcttgagactggtgtctgtttcatcgtcccaggacacggcaaatgaagtcagaacagaaggaggacgctggagggccttgctggctaccgctatctaaagggaacccccatttctgacccattagtagtcttgaatgtggggctctgagataaaggcccgcagacagggacaagggatgccctacccttaacctaggctggacacatttgctgccttctcctcaaggaagaagaacccaagcccctcctcccagtaacccctcctcacatcctgccaccccccctcaagccccaccccctttcaggttccttgctcagccaagcttgtcagcagcctgtaggatcatggttcaagtgacaataaaggaagaaagtagaacactcttgcttctgcctcttcagttgggatccagttagtttaccccaaggccgaggacaaccttaaatctaatcctctacgtacatggactggggagatgggtcccagacacacgtggtgtctacttaacagtcagaaagaaacagactcctgctcggttttaaaatcacatctcatcacgtcctagcttccattcctcccgtccccaattccatttctggactaaggacagcgtaagtgtgatgacagatggcagtggacacagggacctagtgtcaggaatggatgcaggtgggggctgccagtggctgtctgtctgggcaggacctgtgtcttgtcagctttagcccactgtcacaggaaaagggagcggatccctcaccaccagggactccgagatgaacgtttaggacgctgttccattttgtaggtttaaatacttctgcgagtcagccgagccaaggagaggctctctgtattctgatctagacctacatcccacactctgatccacacttgagaatggatggaatggctgactgttgggtatggcgtgcccgtcccaaggctctgagcacagggtccccgagacttgcacctgctccttctctgtactggttttttgttttgttgaggtgaatgttcagtgattattccaacatacttcagctctgcccacttcttactgtcaccagcacagaactgttccccagacagagggtgactcaaggcctagctcactgggtcttccccgcttctcatgccagccaccactgttcgccactgcctccctccacatcgtaacttgtttccaaaggccccctggtcacttgagccatctacctggcgtctgacccaccttcagctccttttaagcttataggccacttcctacggggagccgtccctgcatcaactccctccctggggagcttcactgagccttcctctttagcaaactgtcctactcacagtacctagggccttggcttgaagtcaggaaggagccctgagtactgacctgtgcatgtccagggtcactacactgtctgtcctaagtagccagtaacagtccgagtcccagatgcatggggaaggcaaacctttatatttaaagtcttttattctgagttctttaaaaaacaaaaccaaaatagctggaaaaattgatggggcaaggcttcaggctgcgccaggggtccagggtgtgggatgaaccacacgcgggaccttgctggctctgcagataacatggagggaggtccggaggcctctgggcacggtggatttgaagggagagaggcaagtcgcttaaaaaaatagatatactatacacatgtcacgtagcactcagagggggtgtgtgtcccacctcgcttcctcctggtactgcagcttccctgcgggttcactggtttggccagcacgcgccagccatcatcttctgctgagggagggaaagttaaaaagtccaggcccaattcacgctggccagaggtcagaggcctggggatggatggtcacactctgccaagattctaggagaagaaaacaaaccaggctttggtcagctttgccgacctttatctccacaaaagggaacaaaaccaagggagggatgggcggcagctagcttaggcaccagactccctcagggtggaccctctgcatgctgcagcagctgctgtccaaccaacctgaggaaagaagtctctctctctctctctctctctctctctctctctctctctctctctctctctctccctccctccctccctccctnnnnnnnnnnnnnnnnnnnnnnnnnnnnnnnnnnnnnnnnnnnnnnnnctacccaagctgcccagaaaggctggacgcagtcaggtacctgctctatgcgttgggcctcacacggcaggctcggctgacttcttctgtggggagagaaggaagcaagctatcagttctgtggcttctcctcaccaccgctgtcccacaggtccaggacagaactccctcgaaggatccacgcccccataggtgtaaggatcgagacccactgataccagccctgggcagaactgcctctgatcccaggaagcggctggctggctgtttcttcagtgggctccccgctggccagccaacctgaaagctgaccattgtcccgcctgtggaggtctctcccatcacccctcccctgctcctcctcacaaggtccattagattaagggactggaaaggtggcatgggcctggtctaggtgttagaaggggaagggtttgaattcctagccctgagacccctcaggaactcaatctaccttcttctttttcttcttctggatcggcgaggcagagtctttggccagggacttttttcctttcttcttttcctttttctccttgtcttttttttctgtgggaagaaagcgagcttcctgagcaatagattttgacactgatgggtcagcgtcaggaggcccacggcagctcgcggctcttaacatcaggccctgatagggccaggataccatccatgtgccaggctccactcttactgactgtggactacacaatctggcctcagaactatgcaagtctatctatctaatcttgagtgtgagggaagggacaagaacctgggagagatcaggtgacacatctcctgccacagaatggcagtgctcaggacttccatgctgggcgtggtagagtacccttttaatcccagcacccaggaggcagaggcaggtggattgctgtaagtttgagaacagcctgttctacacagaaagttccaggccggtcaaggctacattgtgaggccctgtcttaagacaaaactaaagcagggactgcctagcgccagtggtctttccttctcagagcctgctttccccttagaaaaggaaaacaacactgcccgaggcccagggctggtgagtgactcagaagtcctgctgggtgcaggttcccgcatggagggcaacgaatggctgttttcaccaaagaactgaattctagagtaaagatgggctctggatgagaacccaggggacagtccacaccccagggactggccgtggactctgctggagcagagagctccctgttgtgaagccggggttgagtttgttttccaaaccctgaggctaaatactgggcattgtaaggggccgtgggggcaggggacgcaggccagctctacagtctccttttgcctttgccaccagacacttgttaaactctggacaaaccacttcccaggctcttgttctctgtggaaagaatgagataaagagccggggcagggccctgccacccaggttgcaccggcagcgcgtactggaaagcagtcacttactcttgagggatttcttctttttcgacttgctcttcgggtcgctctgctcgccactctcaagctttatccccagcaactcgccgtcgggcttctccttggctccttgggggccaggagaccccttccccttgccaccagcactccctttgtcaagctttgattttgccttggaagtcatgggagccttttctggggaaacagcgcttgccctgggcactggctgctccttcttcttcttgttctttggggccccagcttctaggtcccctgataacttccgcttctggctcttcttcccactctccttgatggcctctgtggccttcagccgttcctgctccagaagctctgtcaggaccttcaccacagaggcctgcacctgcgcctcgctcaggggccaggcctgctccaggaggcgctgggtgatgctgttcggcagtgtctgtgtgggggccggcgagcttgaggtgctcttcttgggcttcttgggcttctgaggcgtggagcccgaggaggcctctttcctacctgtagatcacaggtcttggaggtcacaagtctggaaagctgagggtgagatcttgcacaatgcatgacaactgagggggtgtactttacaactgcataaatgggaaactgagatccaggggtcactctgctctatctgtctcctatgcttagctatgtttgtggatcgacagagatcccagaatgctaaggagaggacctgaagtctgctaatgagacggagggcacagtaggtgggacatgggtgacactggttctaggactgcctttatcaacttagtgtagggctttggccaggtcacagtccctcaaggcgtcacagtccctcaaggctgtttcccaccttagaggaagaagctagacatacaatgatgtcttctgccatgaactgtgggttataacacacgagggggtcctacagaccaatgctcagctcccgtctgtagacacaccatgggtccttagcccatcaaggctggggcgacaggcagattggggggcactcctgagtatgctgtgtatgcatgcagtggctgactaagcaggtttactgcctgccagagtggcttctggtgcagcctttgtttagaattttctacgcctctgcttgcctttgataattgtgtgctgactacacgtgtaaaaaaaaaaaaaaaaaccttccacagccccctcgaaaatgtctccttgtcgctcgcacccgcctctcacatagacaagaacactggcgaagaaagtgagcaacagctccgcctctgacccagcgctgggaagctgaagttaccagcccccagagcctgggcccagaacccccgctggcctcccaggtcacctgtgcagcaaggaatgcctacatgctgggcacaggggctgaaccctagcagtgagtgcggttaaggagaagcggacaggagtgggacgggatgcttcatgttatataagtcagggatgtgggcactcccaacagtcccttcccctgggtccctccaaatgtcatgtgacagttttctttatgctctgcttttgaccctgcacgatggcattgctcttaccttgtgtgattaagacacagggtcaggagcttgtcaaggctacagcagtgtgagccagagcagcccccggaggcctgtcccttatccagggtctcctctaggtattgaattctctaaacaaggctgctggcctagtctgagtcattctgggtccctatacccaggacccttgtccactgactgagaagtcagtagggacggacggagagccaaggcctcctccacaagctttaaagaaatagcttcaaatggctggctatatctgttcccagactgcccagagctggcaacctggtcctgggcgccagctgcatttaagggtacctctagttcccagaggaccccacaggctcgaatatgagactcttggaagggacacagacaaatgctgcccataacaagcagggaccagcagccctgcttctccatgtcttgctgtccccactcaccggttttagggagtgcggtgtctgctgcgtgttgggattttgacttctgcttgccatccgggttgtctttggtggccggggcagaagaagctaaggagttggagtctggcctaggagtagcttttgaagcctgggaattagccacagtcaagccgggagtcatgtaacctgagaggagagactgaagaagtccagtgtgaaagacgcatcgagcccctagccgtatcccagaggcaaggctcaagggaatcagtcggtgaccccggatcaggccaacccagccaagcatgagcgggcggcactgagcccacgggggacataggccttcagcttgtgccttctaagctatgtgaattaacgcatatgtaaggcacattaaaaggggactttcttattgccaatggactagtaccatcacagaagatggttaacgttttttgggctggcaagatggctcagagggtagaggcactgacacgagtcgagcctgacagcttgagtacaatccagtaaccttcgtgaaagtggaaggagaggactgaccccaacacgcacccactccccacacgtgagaaagtcactggagtctgtcctgtataggaagagccttaagagagacctaagaagtcgtcttctctggtcatgtctcagaatccatctgaatctcttccctgggccccagagcatgaggtgaggttctatccgattgattagaggcaccccactgacaggaccttacccagggccctgggaatggggatctagacactcatccagggggtggctgaagtctaaaggcagcttccaagttccagccctgcctggcagttacctgtgagggggccaccatctcatcttcgctggattctgtaggggtctcctctaccacagtttccttctgggaagggtctggatctagtgtggaagcagaggtttcccgttgagtgtgagtccctggcggccctgttattcaggccaggcagagctccccaggaggcctccgaggcctgggtctttctctgttcctcatcctcctgcacgaagcctcctgctgtccacccatgctagtctggagcacctggcccgacacacgaatggcatcatttcccctctggttcctgaggctcccacttttctgcccccgcccccctaagggaagcagagtcctgggactcggggccttcaataatcggagcttaacaccaagaagctgccagctgtcgaacagcagttgggtctttgaagttgtaaaggtattatcaggggatgagacaaggccagggtgggctgagaaggccagagcctacagttctaccaggctgtgcctcatctcccaccctccctctgggaatcctcacccagcctgtgggccgacttgggcatctggggtctcttggcatcctcctcgtcctcggaagaagtgtcactgctgtcctccgagctcctgggggccttggggtagcctggggcaagctgctgcttctcagggagcttggatttcccgagcttgttggtggctttgggctggatgggtgcgctctggggaggcatcatggggagtgtttccacggcactgctggtctagtttggtaaagtaggaacacaaggttaagttacagtgagaaggacacggcaggccaggctccacgtgggaagcactacgcatggctttctatgactttcccacagccctctggtgggcactgtggctccttacctggcactagcacactgaggcccagggaggtgaaagaggggctgctgactacacacacaaccatgctggcctttcactgaggtggagcagaagagaacccagtcatatgaagccttctgtcttttaatgtgacttggggctcaccaattaggctaggctggctggttaacgtgccccagtattgggattacaaacgcccactaccatgcctggctttcccctgtgggtacaggagaatgagctcagggcctcatgcttgcacagtaagtgagctgtgcccctgccccatgcttactggcttaaaaaaaaaagatttatttattatatataagtacaccgtagctatcttcagacacactggaagagggtatcatatctcatttcagaaggttgtgggccaccatgtatttgctgggatttgaattcattacctctggaagagcaggcggtgctcttaaccactgagccatctctccagccccctgcttactggctttttaagaatgagctttcaacaccagtgggagagacccagggtccctctgttatccactgatggtacgaggaggccctgagacccatagattctcagaacagcatctgtgctaccctgagccagaaatgactggcatgggtaaagaggcagggatgttcaagcaagaaaagccctgaggccaaggtggagaatagaggagccatcgcagctggaaagatgggtaccaggtggtgagctatggctttgctctctaatctgggcccaggggaggacagcgcagccccaactccagtggccatcacctgtgtctcctctgggatgtgtccctggctaggtggtccctcagggcacccctgcttcccatcctgctagaagtcaggaagagcacacagacaatagatgagcctttgctaagcctcctggagctgcagacacaaagcagtccaggtatggcctgacccccttgctactttatcttacccgccctatgtcaatcacctagggctctagtacctctgggttcccttcctgcagggcaggctctgctcatgttcccagagaagccttcctgcccgccttttctaaagcaggtcacccattattctctgttctgtgctgttccctttgcaacacctagcagttggtgacaactaatttatgctgctttttctgtgtaatggctgtgtctctgctggcttaggactccgtgaaggtctcgtgcctgctgcagcctcggtgcccagcagggcagatgctcaggccatctcactacccactggatcacccggccgccagaggctctttttgggctagtctgtgatgcaccgggtaacagggtggcacagtagctccccgaagctgggaggggcttcagtacagccttcttctcctgccccttagggtgttgggtgtccgatagactcttccctcacgttaacaaaccccattaggcctccagagcaaagaacttggagctggaggacccaggttctggcctggaccaaccctggtgggatgagccctgttttatttagacattgtccactaatcttgccctagatattaataatgcactggactgtgaaggctggaggaaacagtaaggccacttccattacgaatactaagagaggcaagcaactcaagagtcggtttcagcgtctcaaatccagaaaacgaatccacactcaggcaagctgggaggacaggggcttccgcttgccttcgggctcccagcccgctcttccggacaacaccatgggatttgggagcttggctcctggcctgtatgacagtgccagggggctgggagcaagctagtgactggcgtgtggcctgaggacacatggcaaggcagcagagagtgaccccaccacagccctctcttacccgacagtacctgagcggacgccgccgcctttgctttcttgccttttggcatccggctagactgctcactcttgctgggttgggaagctgctcgtgagagggctgcgggcgtcgtcacactggttctgagagctgaaacggaggagaagggggggcacatcaggatacaaagccgtaggactccccagcaaggcattaccagatcactcttccctcggacctatgctgagcttagggatcataaaggggacgctggcttcccaagccttccagacagcagctgtcaccatgtcatttgaaaatggctgctgtggcggtgactccaagccttaccctcatctttttctcttgtgcaggtcacagtgagcaactgctcagttaggaccagtgggagagctgctgggtgctgagatgtttaccacagcctaatgtgagctcatgtcaccactatgtactcgccaaataaacagcagtattttgctgacagtaggaatcttgctgtccatacttaacgacacagtgtccttttttttttttttttttttttttttggtttttcgagacagggtttctctgtatagccctggctgtcctggaactctctttgtagatcaggctggccttaaactcggaaatccgcctgcctctgcctcccaggtgctgggattaaaggcgtgcgccaccaccgcccggcacgacacagtgtcctgatatataactgaagatgattgcgctaccagagggcctcgccacatacaaagacactcagtcaccttaggttctgggaagagaataagtataaaatgttacctgtctcctttttctatgctaaggggatggaagctcactgccaggctaatagtgtaccccacggccaggtggctatagcagagctctggtttagactagcctggttcctgtagccaccagaatgctccctctggctttcaggcttggagccagcacacagaagcctcgaatgtaattccttcaaaatgaggcagacgagctttcct

SEQ ID NO: 763 - DNA, 917 bp, Mus musculus
cagcagcagcagcagcagcagcaacagcagcagcagcagcagcgcctgtgggaaaaactagaggctagagccatggatgaccaacgcgacctcatctctaaccatgaacagttgcccatactgggcaaccgccctagagagccagaaaggtgcagccgtggagctctgtacaccggtgtctctgtcctggtggctctgctcttggctgggcaggccaccactgcttacttcctgtaccagcaacagggccgcctagacaagctgaccatcacctcccagaacctgcaactggagagccttcgcatgaagcttccgaaatctgccaaacctgtgagccagatgcggatggctactcccttgctgatgcgtccaatgtccatggataacatgctccttgggcctgtgaagaacgttaccaagtacggcaacatgacccaggaccatgtgatgcatctgctcacgaggtctggacccctggagtacccgcagctgaaggggaccttcccagagaatctgaagcatcttaagaactccatggatggcgtgaactggaagatcttcgagagctggatgaagcagtggctcttgtttgagatgagcaagaactccctggaggagaagaagcccaccgaggctccacctaaagagccactggacatggaagacctatcttctggcctgggagtgaccaggcaggaactgggtcaagtcaccctgtgaagacagaggccagctctgcacagcagcagcgccccctgctctcctgtgcctcagcccttcttatgttccctgatgtcacaccccacttcccgtctccctgcaccctggggcttgagactggtgtctgtttcatcgtcccaggacacggcaaatgaagtcagaacagaaggaggacgctggagggccttgctggctac

SEQ ID NO: 764 - protein, 213 aa, Mus musculus
MDDQRDLISNHEQLPILGNRPREPERCSRGALYTGVSVLVLLAGQATTAYFLYQQQGRLDKLTITSQNLQLESLRMKLPKSAKPVSQMRMATPLLMRPMSMDNMLLGPVKNVTKYGNMTQDHVMHLLTRSGPLEYPQLKGTFPENLKHLKNSMDGVNWKIFESWMKQWLLFEMSKNSLEEKKPTEAPPKEPLDMEDLSSGLGVTRQELGQVTL

SEQ ID NO: 765 - DNA, 608 bp, Mus musculus
gcagcagcaacagcagcagcagcagcagcgcctgtgggaaaaactagaggctagagccatggatgaccaacgcgacctcatctctaaccatgaacagttgcccatactgggcaaccgccctagagagccagaaaggtgcagccgtggagctctgtacaccggtgtttctgtcctggtggctctgctcttggctgggcaggccaccactgcttacttcctgtaccagcaacagggccgcctagacaagctgaccatcacctcccagaacctgcaactggagagccttcgcatgaagcttccgaaatctgccaaacctgtgagccagatgcggatggctactcccttgctgatgcgtccaatgtccatggataacatgctccttgggcctgtgaagaacgttaccaagtacggcaacatgacccaggaccatgtgatgcatctgctcacggtgagtctggacccctggagtacccgcagctgaaggggaccttcccagagaatctgaagcatcttaagaactccatggatggcgtgaactggaagatcttcgagagctggatgaagcagtggctcttgtttgagatgagcaagaactccctggaggagaa

SEQ ID NO: 766 - protein, 138 aa, Mus musculus
MDDQRDLISNHEQLPILGNRPREPERCSRGALYTGVSVLVLLAGQATTAYFLYQQQGRLDKLTITSQNLQLESLRMKLPKSAKPVSQMRMATPLLMRPMSMDNMLLGPVKNVTKYGNMTQDHVMHLLTVSLDPWSTRS

SEQ ID NO: 767 - DNA, 916 bp, Mus musculus
agcagcagcagcagcagcagcagcaacagcagcagcagcagcagcgcctgtgggaaaaactagaggctagagccatggatgaccaacgcgacctcatctctaaccatgaacagttgcccatactgggcaaccgccctagagagccagaaaggtgcagccgtggagctctgtacaccggtgtctctgtcctggtggctctgctcttggctgggcaggccaccactgcttacttcctgtaccagcaacagggccgcctagacaagctgaccatcacctcccagaacctgcaactggagagccttcgcatgaagcttccgaaatctgccaaacctgtgagccagatgcggatggctactcccttgctgatgcgtccaatgtccatggataacatgctccttgggcctgtgaagaacgttaccaagtacggcaacatgacccaggaccatgtgatgcatctgctcacgaggtctggacccctggagtacccgcagctgaaggggaccttcccagagaatctgaagcatcttaagaactccatggatggcgtgaactggaagatcttcgagagctggatgaagcagtggctcttgtttgagatgagcaagaactccctggaggagaagaagcccaccgaggctccacctaaagagccactggacatggaagacctatcttctggcctgggagtgaccaggcaggaactgggtcaagtcaccctgtgaagacagaggccagctctgcacagcagcagcgccccctgctctcctgtgcctcagcccttcttatgttccctgatgtcacaccccacttcccgtctccctgcaccctggggcttgagactggtgtctgtttcatcgtcccaggacacggcaaatgaagtcagaacagaaggaggacgctggagggccttgctggc

SEQ ID NO: 768 - protein, 213 aa, Mus musculus; identical to SEQ ID NO: 764

SEQ ID NO: 769 - DNA, 1219 bp, Mus musculus
agacacacagcagcagcagcagcagcagcagcagcaacagcagcagcagcagcagcgcctgtgggaaaaactagaggctagagccatggatgaccaacgcgacctcatctctaaccatgaacagttgcccatactgggcaaccgccctagagagccagaaaggtgcagccgtggagctctgtacaccggtgtttctgtcctggtggctctgctcttggctgggcaggccaccactgcttacttcctgtaccagcaacagggccgcctagacaagctgaccatcacctcccagaacctgcaactggagagccttcgcatgaagcttccgaaatctgccaaacctgtgagccagatgcggatggctactcccttgctgatgcgtccaatgtccatggataacatgctccttgggcctgtgaagaacgttaccaagtacggcaacatgacccaggaccatgtgatgcatctgctcacgaggtctggacccctggagtacccgcagctgaaggggaccttcccagagaatctgaagcatcttaagaactccatggatggcgtgaactggaagatcttcgagagctggatgaagcagtggctcttgtttgagatgagcaagaactccctggaggagaagaagcccaccgaggctccacctaaagagccactggacatggaagacctatcttctggcctgggagtgaccaggcaggaactgggtcaagtcaccctgtgaagacagaggccagctctgcacagcagcagcgccccctgctctcctgtgcctcagcccttcttatgttccctgatgtcacaccccacttcccgtctccctgcaccctggggcttgagactggtgtctgtttcatcgtcccaggacacggcaaatgaagtcagaacagaaggaggacgctggagggccttgctggctaccgctatctaaagggaacccccatttctgacccattagtagtcttgaatgtggggctctgagataaaggcccgcagacagggacaagggatgccctacccttaacctaggctggacacatttgctgccttctcctcaaggaagaagaacccaagcccctcctcccagtaacccctcctcacatcctgccaccccccctcaagccccaccccctttcaggttccttgctcagccaagcttgtcagcagcctgtaggatcatggttcaagtgacaataaaggaagaaagtag

SEQ ID NO: 770 - protein, 213 aa, Mus musculus; identical to SEQ ID NO: 764

SEQ ID NO: 771 - DNA, 832 bp, Mus musculus
gcagcagcaacagcagcagcagcagcagcgcctgtgggaaaaactagaggctagagccatggatgaccaacgcgacctcatctctaaccatgaacagttgcccatactgggcaaccgccctagagagccagaaaggtgcagccgtggagctctgtacaccggtgtttctgtcctggtggctctgctcttggctgggcaggccaccactgcttacttcctgtaccagcaacagggccgcctagacaagctgaccatcacctcccagaacctgcaactggagagccttcgcatgaagcttccgaaatctgccaaacctgtgagccagatgcggatggctactcccttgctgatgcgtccaatgtccatggataacatgctccttgggcctgtgaagaacgttaccaagtacggcaacatgacccaggaccatgtgatgcatctgctcacgaggtctggacccctggagtacccgcagctgaaggggaccttcccagagaatctgaagcatcttaagaactccatggatggcgtgaactggaagatcttcgagagctggatgaagcagtggctcttgtttgagatgagcaagaactccctggaggagaagaagcccaccgaggctccacctaaagagccactggacatggaagacctatcttctggcctgggagtgaccaggcaggaactgggtcaaggacacggcaaatgaagtcagaacagaaggaggacgctggagggccttgctggctaccgctatctaaagggaacccccatttctgacccattagtagtcttgaatgtggggctctgagataaaggcccgcagacaggg

SEQ ID NO: 772 - protein, 214 aa, Mus musculus
MDDQRDLISNHEQLPILGNRPREPERCSRGALYTGVSVLVLLAGQATTAYFLYQQQGRLDKLTITSQNLQLESLRMKLPKSAKPVSQMRMATPLLMRPMSMDNMLLGPVKNVTKYGNMTQDHVMHLLTRSGPLEYPQLKGTFPENLKHLKNSMDGVNWKIFESWMKQWLLFEMSKNSLEEKKPTEAPPKEPLDMEDLSSGLGVTRQELGQGHGK

SEQ ID NO: 773 - DNA, 1353 bp, Mus musculus
gacacacagcagcagcagcagcagcagcagcagcaacagcagcagcagcagcagcgcctgtgggaaaaactagaggctagagccatggatgaccaacgcgacctcatctctaaccatgaacagttgcccatactgggcaaccgccctagagagccagaaaggtgcagccgtggagctctgtacaccggtgtttctgtcctggtggctctgctcttggctgggcaggccaccactgcttacttcctgtaccagcaacagggccgcctagacaagctgaccatcacctcccagaacctgcaactggagagccttcgcatgaagcttccgaaatctgccaaacctgtgagccagatgcggatggctactcccttgctgatgcgtccaatgtccatggataacatgctccttgggcctgtgaagaacgttaccaagtacggcaacatgacccaggaccatgtgatgcatctgctcacgaggtctggacccctggagtacccgcagctgaaggggaccttcccagagaatctgaagcatcttaagaactccatggatggcgtgaactggaagatcttcgagagctggatgaagcagtggctcttgtttgagatgagcaagaactccctggaggagaagaagcccaccgaggctccacctaaagtactgaccaagtgccaggaagaagtcagccacatccctgccgtctacccgggtgcgttccgtcccaagtgcgacgagaacggtaactatttgccactccagtgccacgggagcactggctactgctggtgtgtgttccccaacggcactgaggttcctcacaccaagagccgcgggcgccataactgcagtgagccactggacatggaagacctatcttctggcctgggagtgaccaggcaggaactgggtcaagtcaccctgtgaagacagaggccagctctgcacagcagcagcgccccctgctctcctgtgcctcagcccttcttatgttccctgatgtcacaccccacttcccgtctccctgcaccctggggcttgagactggtgtctgtttcatcgtcccaggacacggcaaatgaagtcagaacagaaggaggacgctggagggccttgctggctaccgctataaaggcccgcagacagggacaagggatgccctacccttaacctaggctggacacatttgctgccttctcctcaaggaagaagaacccaagcccctcctcccagtaacccctcctcacatcctgccaccccccctcaagccccaccccctttcaggttccttgctcagccaagcttgtcagcagcctgtaggatcatggttcaagtgacaataaaggaagaaagtag

SEQ ID NO: 774 - protein, 277 aa, Mus musculus
MDDQRDLISNHEQLPILGNRPREPERCSRGALYTGVSVLVLLAGQATTAYFLYQQQGRLDKLTITSQNLQLESLRMKLPKSAKPVSQMRMATPLLMRPMSMDNMLLGPVKNVTKYGNMTQDHVMHLLTRSGPLEYPQLKGTFPENLKHLKNSMDGVNWKIFESWMKQWLLFEMSKNSLEEKKPTEAPPKVLTKCQEEVSHIPAVYPGAFRPKCDENGNYLPLQCHGSTGYCWCVFPNGTEVPHTKSRGRHNCSEPLDMEDLSSGLGVTRQELGQVTL

SEQ ID NO: 775 - DNA, 31279 bp, Homo sapiens
gctcaagccatcctcccaccttaacctcccaagtagctggcactacatgtgtacaccaccacgcttttgctaatttttaaattttttgtagagacagggttcttatgttgcccaggctggtcttgaactcctgggctcaagcaatcctctcgcctcagcctcctgaagtgctggaattacaggtatgaaccaccaggcctggccaaattattcttattgaggctggcattgttccgtatctggctggcggtgccccttcaagttggctcctgggtccttctttcaagccccaggagtctttgagaacttcttggctttctggaaagaaaaaaacagagatgtctcagcatcacctgcattcccccatctccagccctgaaaccagccatttggaagctgggatgtggccccaggcagtctgcctcaagttcttttgtttttcacactcatgcaaactgcagaacagttccagttctggggaccttgctgtgtgaccttgggccagttcctttcccctctctaagtcatactttctctgtatgaaactctgtggagctgggttccaccttactccatctccccatcagggtgtggcatccaagctccactgcttcctgttactctgtctccctcctcctgtggtcaggggtaggtgggacaaggctccttccctgggcggtggagcctgtgtgacaagtgagaaactgggacttcttaccctgtaaggaaagatgcagggagccattgtccacgccctctgggaaactcagtcttgggaccctccctcttggctggcatcagtctctaacctccaagggcacgggcaggatgaccgtgggatttccctcagctgtgtcctgaaactgctgcacagagaaaagagttcggactgccattctatcaccattggtttagaatctagtgactgtgatgcattattccctttattttaaatttaggctgggcgcggtggctcacgcctataatcgcagcactttgagaggccgaggtgggcaggtcatttgaggtcaggagttggagaccagcctgaccaacatcgtgaaaccccgtctctatgaaaatacaaaaattagccgggcatggtggtaggcacctgtaatcccacctactcaggaggctgaggcaagagaatcgcttgaactcaggaggcagaggttgcagggagctgagatcacgccactgcactccagcctggtgacacagtgagactccgtcacacacacacacacacacacacacacacacacaccccaaaacaaaaaaaactataaatttagttttaccttgtattgaagttgtaaattcacatagtctaaagaatcaggccgggtgcagtagctcacgcctgtaatcccagcacattgggaggctgaggcgggcagatcacctgaggtcaggagttcaagaccagcctggtcaacatggtgaaaccctgtctctattataaacacaaaaaaattagcctggcatggtagcacgagcctgtagtcccagctactaaggaggctgaggcaggagaatcacttcaacccaggaggcagaggctgcagtgagccgagatcgctccactgcactccagcctgggctatagagtgagactccgcctcaaacaagcaaacaagaatcaaatagttctacaagatttgctgtaaaatgagtagcagatcttcaccatcctctttacatcagtttcaaacttaaaaaaaatttttttttccatctccgtccccaaaccgcctacccaatttaactgggcatggttgctcacgcctgtaatcccagcactttgggaggccaaggcaggtggatcatctgaagtcaggagtttgagaccagcctggccaacattgtgaaaccccatctctactaaaaaaaaaaatacaaaacttcgccagtggtggtggtgggtgcctgtaatcccagctacttgggaggctgaggcaggagaatcacctgaacatgggaggcagaggttgcagtgagctgagattgcgccactgtattccagccttgggtacagagcaagactccatctcaaaaaaagaaagaaagagagagagaaaaaaagaaagaactctaaagtcattctgattcctaatcttctgattcctaatcctttatatctgtcttgatttttcctttctggaaatttgcagaatcttctctttgttcttattttgctgaaacttcacaacagcatcccttgctgtgaaattgctttcacaccttgtcctcagtgctcactgggcctcttcagtttggaaatttatgtccttgagttctggaaaatgtattgacttatttcactgatgatttcttcccctctatattttctgttctctatttctggaacttggtatttggctgttgggcctcctggactggtgtttaattctcttatcttttctgtctgatttttaaatttatctttgtggtccacactttgggagattttaaaaaaacactttatcttccatctattgactgtttaatatctgccctcatattttaaatcttcaagagctatgctttgttcttctatactacttatacttttatagcatcctattcttgtttcatgggtgcagtatcctcctttttctccctagggctattaatgacagttcatttcctccatagtgcttttttttttttttctgtgtggttgttttgttcactctcttttatgttaaaggctttctttagatgtcccaggattctggattatctaaaaaacctgattgtctaagacagctgtgacccatgagtaggacttatccaccaagggcttcctatagggtattctggttgagttgtttcatcaggaaattcccagtgtcagagtcctgaggcctttttttcctgggatggtcatgctccacagagaagcttcctccaggctgtggcttgggtgaaggcctggctttcacactgtgggtaggggagaacactgggcctctcagcttcagtaccaggctcacgttctttatttgtctgggaaagacacttgcaattgtccctcaaggagggggacgggtggccctcggggagggagagggcgtgggtatctcactgcctcagaaacagacttccaaactaccttcctctttttagccccacctctactcaccacccaggtacccgacacaccagttcctgagtctgttctgccacctaactacgtggcttctcagcttttctagccgcaggtttaggatgcagtttttttggggtctactaagggacttaacacttgctcacctgctttcctgcttctcaaattctattgttttctcatctcctgttctctttgttcttgtagatttacacttaaaacaacctatggtcattttagtgacaaaagcaaagtgagagaggaagcaaaagtaaatgtgtgctctatccatcattacaatcttcaaaaaatgagacctaattcatgtaccataacattcaccctttaaaaactgtataaaattcaatggttttttgtacatccacaaagttgtgcaaccatcatatctattctagaatattttcattacccaaaagggagccccatacctgttagcaaccactccccctcctttcttccccacagccccccagcaacccctaatctatattttgtctctgtggatttgcctattttgggcacttctcataaatggaatcatacaatgtatggccttttgtgtctggcttttttcacttagcataatgttttcaagggtcatctatgtcgtggtatgaatcagtacttcattattttttaaagtaacagttttattgagtattcattcctctttatgacagagtactatttcattgtatggatacaccacattttgtttacctattcatcagttgaatatttgggttgtttctacttttttgatattatgaataatggccctatgaacattcatttgtgggcaaatttttgtgtggatataggataccatttgtcttgactacacagaaaatagcttaataaatatttgagctgggcacagtggctcacgcctgtaatcccagcactttgggaggccaaggcgggtggatcacttgaggtcaggagttcgagaccagcctggccaatgtggtgaaaccccatctctactaaaaatacaaaaaaattagccaggcatggtggcgcacagctgtagtcccagctactcaggaggcttaagcatgagaatcgctcgaacctgggaggtggaggctgcagtgagccgagatcacatcactgcactccagcctgggtgacagagcaagactctgtcttaattaaataaataaataaataaatatttgaacagtacagtttcactttttttttttttggtgggggtaatatccatcatctcaaacttttatcatttctttgtgttgggaacattcaatatcctttttccagctgttattgaacctagcgaggttctgctcacatggcatcataaggccaaatatttatatcgaggtttgtagtggaataaaagagggtatttatttgtagacgaccaagtaaaagaattgggcatctcatgcttaagagctgaccttggttgggtgcaacagctcatgcctataatcccagcacactgtggggccaaggcaggaggatcacttgagtccaggagtttgagaccagcctgggcaatatagtgagacacatggtctctacagaaaaattagctgagtgtggtggtgtgtacctgtatccccagctactcggaggctgaggtgggaggatcccttgagcctgggaagttcaggctgcagtgagccatgattgcatcactgcacttcttcaagggggacagagtgagaccctgtctcaaaaaacaaaacgaaacaaagaaacccatctccaatgagtggcttataagcaaggattttttttttttttttttttttgagacagagtctcgctctgtcacccaggctggagtgcagtggcgtgatcttggctcactgcaagctccgcctcccgggttcacgccattctcctgcctcagcctccagagtatctgggactacaggcgcctaccaccacgcccggttaattttttgtatttttttagtagagatggggttttgccgtgttagccaggatggtctcgatctcctgacctcgtgatccgcccgcctcggcctcccaaagtgctgggattacaggcgtgagccactgcccccagccataagctaggattttaaaggcaggggtaaatctgaggaaagcagaagttataggcaaaattctaaatcaatacatgaaggttatatattggtttgacctaaaaaggtgggacatcttgaagtgggggtccacaggtcatgggtggatttaaagattttctcatttgtcattggttaaggacacgaacgtttgtctaaaaatctggggtcagaaaaaaggaatgttagctctggcctgtgggcatgacctcctccaggcccctcagaaagaaatttatttatttttaatgtttaaaatgtattatttattgagacaggggctcgctctgtcacccagactggagtttagtgggacaatcagtgctcactgtagcctcaaactcctgggctcaagtgatccttctgcctcagcctcccatctagctgggactacagatatgtgctgccacacctggctaattaaattttgttttgttttgttttgtttttgtagaaatggggggggtcttgctttgttgcccaggctggtcttgaacttctggcctcaagcagtccttccaccttggcgtcccaaagtgctgagattacaggtgtgaaaggaagaaatttagagcaaagattggtggttagagtttagtcctctgctcccccttgtctgagatctatgagccagtggatctgtttggtgggggtctgggtttatgaaaagcaatgcagggacataagttaagatgttatctttagtttttatagggagccaaataccccatgattctaacttttttggctattgtcttaagttattactatatttttgtttatcagcttgctcatttacttctcaaggctagctaggtgcctgaaatacttttgaagaaacgtaagtttctttttcttttcttttcttttttctctttagagatggtcttactctgtcacccaagctgcagtacagtggcatcatcacagctcactgcagcctggacactcaagcctccggggatcctcctgcctcagcctcctgagtagctgggactacaggcacgtgccaccacgcctggctaattttagaaaaatttttgtggagacgggggtctcactgtgttgcccaggctggtctcgaactcctggcctcaagcgatcctcccaccttggacctgctaaagtgttggaattacaggtgtgagccaccatttctggcctagatttttctctctttttatgttggtggggtgctcagctggcccctaagaagggtccctgctctgtctcacagctatttgaaactgtatgttattgttaactatagtcatcccacaggggtatagaaaatgagaacttagtcctatctaggtgcaattttgtatccttttgcatccccgtccctcccttccccctacccttcccagcctctagtatcctctgttctacttttcacttctatgagttgaactttttttagcttccacatatgagttagaacattctgtgtttaactttctgttcctggcttatttcacttacaaaatgtctccagttccatccagtttcatatcttcagcatcttctatggtgcgaggctctggctaaatgcttatttagtctaacagctctgcaaggctagtattaccatccctgcattacaaagcagaaagcaaaatcagaaaggttgaggggccaggcgtggtggctcacgcctgtaatcccagcactttgggaggccaaggcaggcggatcacgaggtcaggagatcgagaccatcctggctaacacagtgaaacaccatctctactaaaaaaatacaaaaaattagctgggtgtggtggcgggcacctgtagtcccagctacttgggaggctgaggcaggagaatggcatgaacctgggaggcggagcttgcagtgagccgagatcgtgccactgcactccagcctgggcaacagagcaagactctgtctcaaaaaaaaaaaaaaaaaaaagaaaagaaaggttgagggactggttcagggactcacatgcctaggatgtttctgacttgggatttgaactcaggtctggccacatcaaaggccatgtctgctcttcgctctcctcccaaaatacatgtactatctcatttgactcttgaaatccaaaactcattgaaccttcgaaccacaagtctaaatttattaaaaaaaatttattaatgcaaattgtaaagcacacacaatacataaagattaataaaacaaatatggtatataaaaggaaacttgtttttttacactcacagcacttctgacaccaaatgtgtggattttttctacaccaacaacaaatgttctaactctctggacaccaactgggcatcctacaattcaattctgttcagacactatctacctggggttagcatctgaacccataggttgagggctcagtcagacaagactcatccacttcagatgccaatcctaagtcccgggactccagtacttctgatgagttggctacaaattgggagttcccacgactccctcttcatacttgacaaatagctacaatggcccacagaactgagaagcactttacttactattaccagtttattataaaggatacagatgagcagctgatgaagaggtctatagcgtacggcatgtgggaggggtcctgaacacagcagcctctgtccctgtccttgtggagttggggtgcaccaccctcctggcacatggatgtgttcgtctactcgaaagctctccaaacctagttgtttgggatttttatgcaagttccattatgtagacatggttggttaaatcactgattgaactcaacctccaacccctctctcctctctggaagtcggggtggggcgggtgggggtgaggtctgaaagtcccgaccctctcctcacatggcacccagcctccatctgaagctctctaggggctttcagccaccagcatttcctgaatatataaaaaaagacattcttctcactctggagatacttttttttttgagatggagtctcactctgttgcccaggctgaagtgcagtggtgcgatctcgcacctccgcctccagggttcaagcgattttcctgcctcagcctctcgagtagctgcgattacaggcacacgtcaacatgtccggctaatttttgtgtttttagtagcggggtttcactatgttggtcaggcttgtctcaaactcctgacctcatgatacacccacctcgacctcccaaagtgctgggattacaagcgtgagccaccgtgcctggtctttttttcttttttttcttgtttttttttttttagacagagtcttgctctgtcacccaggctggagtgcagtggtgcgttcttggctcactgcagcctctgcctcctgggttcaagcaattcccctgcctcagactcccaagtagctgggattacaagtgtgtgccaccatgcctggctaatttttaaattttttgtagagacagggtttcaccatgttggccaggcaagtctcgaactcctgacctcaactgatcctcccgcctcagcctcccaaagtgctggaattacaggtctgagccaccacacccaggcttactctggagactctttggttcttagtggtccttgtgtcaggaaccagggacagagaccagagacgtttttcactatgtcacagcacaggagccttgccaacacagtcccatcctcccaggcaccctttcccaggctgtcctcttccctcccagcacaggcccccattctcctggatctgaaccacacaaggaggcagaggggtagagtggttaaaaatgcaggcgctactactttctggaggtgtgatcctggacaagagcccctgtgtccctatctgtaaatggagatgataaaacactcctcaaagggcctccgtaaagatcacaggaaacaaagcatggacaacgtgcctggcacgaaggagagcttggtaagtggaggcaagtctgagtgccagagccttaaaaccatggactcttaggtttgaaggaaatcaaaatattcctctctaaaaacctgcggattttagttaaaggtaaaaggttaaaacccaggggcaccctctgccccttctctctgtcttgatcagctcagaagcagagctcagaggatcctggatcagacttgactgttcccatacattcaccttcccacatttccagccctttggaaccctgaagatatcctcttctctgtcctgtcactctatgggacttacggctctttgttaaaatactatttaagcaaggcccctaagccactgccttgagagagaaatacttctcaactgaggcctctactgcataatgggtacagcatgtgttaatcaactttggctgatttttcttttgttaagttgacttttgtttccaggggagcgtgtcaactaagaacctaaacagggaaagaaaagaaatgttttcacccctgcacgtcgtccaaacttcctcctgcgtgtttgagacgacataacggaggccagagaagaggacttgtctgagctcaccaagggtgcacagcccctttctgcacccactcatctgtggatgagaaggggagacaaacaaaggtgtcttctgtttcaaagtgctttcctgtctagggagtggacatttgcctttttcttgaaacattcaaagagccttatgaatccaaaggcctgcccagaaacaagtgatgagggccctgggcagccaatgggatcgtgctggcctttctacctgcctggggagcccccccgccccacatcctgccccgcaaaaggcagcttcaccaaagtggggtatttccagcctttgtagctttcacttccacatctaccaagtgggcggagtggccttctgtggacgaatcagattcctctccagcaccgactttaagaggcgagccggggggtcagggtcccagatgcacaggaggagaagcaggagctgtcgggaagatcagaagccagtcatggatgaccagcgcgaccttatctccaacaatgagcaactgcccatgctgggccggcgccctggggccccggagaggtatgtgtgagcaccaggaaagggcacaccgatcctggactgcagagccgtgcgcatgtgctgggaagaagcaccggccaggagtcacaggaaagagggattcaggctctgactctaacattgactttttgggtgattttgagcaagtctttggcctgctctgggctccggctccctctcttgtcaaatgagggggttcctttaagagcaggagtttgtaactttccttgcatcacaccgcctccttctgaaaagcagaagagagcatgggttctctccctagagtttcacatgctatgcaggggctttgagatcccactaaagctgggctgtgaatgctaggttaaaggccttggaacaggctgtgcctggtggctcccgcctgtaatcccagcactttgggaggctgaggcgggcagatcagctgaggccaggagttcgagaccagcctggccaacatgttgaaaccccatctctactaaaaatacaaaaattagccagatgtggtggtgtacacctgtaatcccacctacttgggaggttgagacatgagaatcacttcaacctgggaggcagaggttgcagtgagccaagattgtgcaactgtaccccaccctgggtgacacagtgacactctgtctcaaaaaaaataaataaataaataaagaccttgcaccagattttgaaaatgttcaagatcccagtggagaaagagtttctaaaagaggatggtagaagcagttcttcacagaggagttccctcctaattaccacggatcaagggaatgatagttgcaggtgtctgtagagtagatggagacatctgccatcacaggagggattgtgagatgttgggggcaggcaagaaaggagggacaggctctggttaaatttctggagggggctcagggttgacgggggtcatgtccttgcctgtgcccctctcccttgcagccagaggccagcacagccatccaggggacaccaggcccccacttcccagccccaaaatagcctcacccatgtgtttccctcaaaaagggctagaaggctattaccccaatgcccctgctacccccagtctccaaaaagtaatttgcgatctacagggacttacagctaggtgtgatgtcagctgttgccaggcagaaaggggtttgggagaaccctgcagagatgttatgacaagctatgttctggggaacaaggtaacctgctgcagaccattagagctgtggcctgtgaaaaccccagggaatcccatggcaaggagggagactgttttgtgaggaatggattcaggtctaggccacgcgtgaccttggataaatcactgcctctccctgagtctcagtaataatataatagccataatagttctcatccactgtgtacctgtcaccaggcctcagccactgttagttagtactgtgattatttacatacgtaaaggctaaactcaattttaattcttacagtcaccctatgaatcaggtacttttgttgtccctttttacagaagaggaaattgaggtcatattggtaagtgacttacccaagtaatcatagctagtgagtggttggaggcagaatttgaaccaggactagtctgacatcaaagtgttagctcactccaccatttggccccctttcagaggtgcattttgtgggaaggggaggtgagacccctctgagctcagaccactcagtgatttacagacccaggtgggctcagtgttcagagtgcatgtccccttgtctaatccttgtctagttttccctttattcagttactgcttctaaagctggctatgtgtgcttaggccattccagactggagcctgttttggaggcttttgtgaatgcttctgcctggcaacatctgtgtcacgattcctgctagctctggttggctcctgactttggcttttttttttttttttttaattgcagaagaaggtagtgtaaatgaggaaataaagaggggggtgacaagagttggcactctaccagaaccaggggacaggcgttcaagatgcataaagaggaagaaaagcagatgctaaacttaactacgaactcccctgagaattgcactgagtgtaatttatttatagagtgctaacaatgtgctaggtgtggagccaagagctttaccctcatcatcttatttaatgtaacagcccttggagcagatgttttacccgattttactcacacagagggttaatcaacttagatggtcccagaactaaccgactccagagccaggattccaatccaggttatgtggtctcgtcttcagggtgaatctctaggttcttaggcctcctgaggaactgtggtgcagagaggggaaggtactgtcccatgtcgtgtgtgggaggtagagctggggctagaattgggtgtggggttgcagaagcactgaacaggtggaggatgaggctggagagcctgaacacaggctaggccacccgtgttccttgagaaggccaagaagtagaatttgttttcccttcctgtctggtctccccacttcccccccgccccccgcccaccgtcgggtttttgctgtttccttcccgaataactctcccttgggctgggccttatcccagaaagcacagactggcacgcagcaagccaatgagaatgagccagtctgtgatgtcatgagttaccaggcacaagggactcctggagcgtcctaaaccatccttgctggttgctggagtaggcagggtgcagcctcatccttgcagttcccaatgggtctgttttagtccgttttgtgccgctttaacagaataccacagactgcgtaatatacaaacaaacaaacaaacaaacaaaaaacacccagaaatttatttctcacagttctggaggggctttcttgttttttttttttttttttgttatgttttttgagacagagtctcactctatcccccaggatggaatgcagtggtgtgatcttggctcacagcaacctctgcctcccaggttcaagtgattctcctgcctcagcctcctgagtagctgggactacaggtgcccaccactacgcccggctaattttttcttttttttttgagatggagcctcactctgttgcccaggctggagtgcaatggcatgatctcagctcactgcaacctccaccttccaggttcaagggattctcctgcctcagcctcccgagtagctgggattacaggtgctcgccaccacgtccggctaatttttgcatttttagtagagacagggtttcaccacgttggccaggctggtctcgaactcctgacctcaggtgatctacctgtcttggcttcctaaagtgctgggattacaggtgtgagccaccgcgcccggcctagcttgctttcttttttttttctgagacagtctccttctgtcacccaggctggagtgcagtgacgtgatctcggctcactgcaacctccgcctcccgggttcaagtgattctcccacctcagcctcccaagtagctgggactagaggtgcacgccaccatgcctggctaagttttttgtatttttttgtagagacggggtttcgccatgttggccagactggtctcgaactcctggcctcaagtgatccacctgccttggcctcccaaagtgctgggattacaggcgtgagtcaccacacccagcctggtgaggggcttccttgatgtgtcctcatatggtggaaggcagaagggcaagagagaaccaactccttccatcaagccgtcttacagggcacctaatcccattcgtgagggagaaggccttgtggcccgatcacctcccaacaccttcacattggcaacacctggactagggtcttagtagtcccacccctggggtcgtcaaagaacagatcagaaactcctggggtgtaggggcaggatccttacatcccctgtactgtaacatatgcatgcaccccccagtcgcatccaagtcccacagatacaagggcttgctgaggtccgagggtctggatggtgagtccagggagcatgagaaattcatccaggccacacaggctcaggcacctatactcctgcccaccccctgcaggatggatattaccatttgaaatactttggcgcttgcagtgagatcttgcttaaaagaagaaacccaccaaattctagaatcgcagaggtgggggcacctatgtgacaaatgagggaacagaggcacagagattggcagggacatgctcaaagacatggagagcctgggcagaggatggccccagagtgggtggtgcctggccctgcttcagcctgacattgtccaagcctcccccagcccactcctaaaatggccaggccccacttcttcccaggtgggctacattttctgctgtcccggtcccacttccttaccttttctccttaaatctgatttcactgtgagggtgggaggttgggcagaggggtgaaaaccctcttccccttacttggtaagcacatacaattttttttggttttgtcaattaaaaaaaataacatacctggttgatcctgccagcagaaaaaaaaaacaaaacaaaaggctgggcgcggtgactcacgcttgtaatcccagcactttgggaggctgaggtgggtggatcacgagatcaggagatcgagaccacggtgaaaccccgtctctatcaaaaatacaaaataattagccaggcgtggtggcgggtgcctgtagtcccagctactcggagaggctgaggaaggagaatggcataaacccaggaggtggaggttgcagtgagccgagatcgcgccactgcactccagcctgggcgacagagcaagactccgtctcaaaaaacaaaacaaaacaaaacaaaacaaaaaccaaacctgttccccttgagggcagccctgatcatcaggagatccgcacggcaaagggagcctgggaagacccccccacctcaacccctcatcgcacaggcaggaccctaaggtccagagaggacaaagagcatgcctctttgctcttctctgttcaactcaggcccgtggcagctgcagggtctctgccagggaagacttcaggcacatcgatggttggaaggaggggtggggtgaggtcttcaagctgtgtttccatagccagcttactgtttgtgcttcaaatgcattgtttattaggggtggcttaggggtctaatggagatgggggtatacatttccccattcctagccagcccttggggcagccaccactgtggatcctcctctgacctatcctccccacctcccacagcaagtgcagccgcggagccctgtacacaggcttttccatcctggtgactctgctcctcgctggccaggccaccaccgcctacttcctgtaccagcagcagggccggctggacaaactgacagtcacctcccagaacctgcagctggagaacctgcgcatgaagcttcccaagcgtgcgtgcacccctacatcctgataccccccacctcccaccatccctcaactcagagacccgcatccctgcacccagctgggcccactgtcctctccctccggtttggaattccagcccttcctcatctgggtctgataccctcctccctgggcaccggggccacacttaccctcgttcctgtccccacagctcccaagcctgtgagcaagatgcgcatggccaccccgctgctgatgcaggcgctgcccatgggagccctgccccagggggtaaggacagccccagggtggtgggaggggcaaggttatcccgcctggatggaggacagtgccaaggggaggggcagggaagagagcccacctggggaggggtcctgactgctgcgggagggacagtgcctgcctcaggaagaatcgggctccccaggtgtggagggcacaggtgaagagtctcttggtgccatccctgggaggaaggctcagccctctacagtttacaaagtgcttctcatttcctatagcatctcactgtcctctcccattctcaaagaccttgctatcatgcattgacaatatttatattcacaatactgtgctgtggacaaaaccctgggcaggaaagcttatgccagtttgaccaatgaggacattgaggcaggaagctaaagtgacttgctcgagctctcatgtttggaggtggcagagatggaaccattgaccaagtgcctgcgattccagtctcttacctagatcccagcaaccggctcctgctccataccccctgctccagggaccagctctggtaaccttctgttacttcctcccacagcccatgcagaatgccaccaagtatggcaacatgacagaggaccatgtgatgcacctgctccaggtgagtgcagggagctagctgggtggtcctgcctgcccacccaggaccctggccgggccaagctccaaggcctgtatacctggctcatggcagactttcaacatgtgctctctggattactgaatacaagggtgacccttaaatgttatatgtagtctggcctctgcatttttgagataaacaggctcggctgggtgcagtggctcatgcctgtaatctcagcactttgggaggcctaggcaggcagatcacctgaggccaggagttcgagaccagcctggccaacatagtgaaagtctctactaaaaatacaaaaattagccggatgtggtggcagtcacctgtaatcccagctactcatgaggttgaggcaggagaatcgctttaacccgggaagtggaggttgcagtgagccgagatcatcacgccactgcactccagcctgggtgacagagtgagactccatttcaaaaaataaaataaaataaaaataaaaaaagaaactgaggctcaaagtttggaagtgacttgctcaagacaccctttttttctccccaaatttgtactgcgtgtctgtcctatgccagcactgtgcaaggctctgggcccacaatggggagcaattggacccagctcctgaagccatggggatcccaggctagtgtgggagacagacaagtgaccaggtgatgacagaagtgcagggggctttgtgaagaaagaggcagaggactcaacctagctgggggcagtcaaggttgggtcctcacctgctggagcaggtaagacctgaaagctgagcagccatccacagggaggacactggggcttgttggtagagctggcctggaatctggaactcgactcgcaacgctgcagtctcgtagctgaacagctggactacccttacccgtaccctcccctcccctcccatcatggctgaagtccagggtttaggcttggtgtagctctggtccattcctcagaatggaagaccaagggaacgtgggctacacatttcacactgcctgccagggagctcttcttgaaccatccttcctgccctgctaccctgtagaatgctgaccccctgaaggtgtacccgccactgaaggggagcttcccggagaacctgagacaccttaagaacaccatggagaccatagactggaaggtcagcaggtttccctgcatgggaactctctctttcctctggtgtctagggcagggctaggagaggtggggtgagggtgggctggggaagccattctcaggaagctgaaggggtttaccagcacttccaaaacctggatgctgcagagtatgtggggttcagccccaggggtctttaagagggaaccaggctgcagctggacccgggtgttggggccctatttggccctgcatgtttctgtccccaggggcaaagccaggcagtgtaggggcttggtggtggccatcgaacctgacctccacctctatccgtattaggtctttgagagctggatgcaccattggctcctgtttgaaatgagcaggcactccttggagcaaaagcccactgacgctccaccgaaaggtacagggagtgggagctttagcgtgccagggcttctggaccctcggggctctcctgaagctgctgaggccggggcctccagcactccctggtcccagcaccgcggaatctcccatcctctcagctctcacttctttctcacttctctctctctcctgtctgttccttcttggtttggctgtccccctcccctgacccacccccatcttgtctaagggttcctaagggcccacagaggcctgtcaccacagggtacaggtgacctctctcatagaggatggtacagcacagggtgcctggggtagaacctgcccgaaacactgcagaaaggaatccttgtaatgaccttgccccagtgctgcccgcaatccagtgagggcgccaaggtcacagctgctgccaagagagccttgggcgtttcccacctcatggacaatgcagactaggatgtttttagacccaaagacagagtgctgtttctatcccggtgctgtctctaatttgctatgtaactttggacaagtccccttccctctaggattcagggtcctgaagtagaaggtcaaagggccaccctgcctggggcctcagtttctgcatcagattcatagaaggcaccttacatgctatctccaactcctagctgatgcttaaacccctctaagacatctccaacaaacggtaaaccccatttctacttgagaactcccagtaacaggaagcttagacttaccaaggtgcccattgcttttctctagaatcagaatcgcaagtgcaattccaaactgtaatggtgtttttttgtttgattgtttgtttttgagatagagtctggctctgtcgcccaggctggagtgcagtggtgcgatctcagctcactgcaacctcagcctcccgggttcaagcaattctcctgcctcggcctcccgagtagctgggattataggcatgtgccaccacgcccagctaatttttgtatttttagtagagacagggtttcaccatgttggccaggctggtcttgaactcctgacctcaagtgatccgcccacctcggcctcccaaagtgctaagattacaggcatgagccactgtgcctggcccaaaactgtaatgggctttgagtgtcagaagaaaccatcaacttctgaggtgaattggacacatggccattcacttcctttttgatctcagaccttgttggtctaggcctcagttttcccatccgtgtgatggctggagtgagtaaagccacttgggaagaaggcattaagcccacagcagtggtgtgtgggtctttagctctgctcagaccctggttcagagctcactcactcactgtgtcctcatcatgcctgtcgcttcagtactgaccaagtgccaggaagaggtcagccacatccctgctgtccacccgggttcattcaggcccaagtgcgacgagaacggcaactatctgccactccagtgctatgggagcatcggctactgctggtgtgtcttccccaacggcacggaggtccccaacaccagaagccgcgggcaccataactgcagtggtaagcagtggcactgtgccagtgtcagaggaccaggaaggactaggaaggttgaggggcaagaggtcccctctgaagcacatgggaccaggacacccaggatggcagctcctgggggcagtgacgtagtcatgcgtccagccctttatccatccacccacctgtgcattcctatttgtccatttatcatctctcctcttacatgcactcatatttgttcacttatccgtcagtcctttcatctgtgaatttcatccatccacgcgccatcctctagcatccaggagtcctacagacccacccatctcatttcatcacccccttctcactcgagcccccattacacctctttgttgctgcttgcagctgtccttccctgggtacctgctttcccaggcactaagcctgtggctaggtgggaagcactgccctcaggcatcttgggtcaggtaggctgcacttcaagtgacaaacggacttgctgctcctttgcagagtcactggaactggaggacccgtcttctgggctgggtgtgaccaagcaggatctgggcccaggtaagggccttgcagaggggcatctggtcaccagcagctcatccccagcagggccagctcctttgtgggcaggtgaaggagtgtgacgctgggccactctccaacattcctgggatgtccatttcacagacgaaggaacagggttggggggctgtggggagttacacaaatccatgatggtcattattggacctgagcagggggcaggggagggtggacagtccttaactgctctgcaggtccaggatgttagaaaggggcagggacaacaaatgggtgaccccaacctcaacctgctgcttctctctccagtccccatgtgagagcagcagaggcggtcttcaacatcctgccagccccacacagctacagctttcttgctcccttcagcccccagcccctcccccatctcccaccctgtacctcatcccatgagaccctggtgcctggctctttcgtcacccttggacaagacaaaccaagtcggaacagcagataacaatgcagcaaggccctgctgcccaatctccatctgtcaacaggggcgtgaggtcccaggaagtggccaaaagctagacagatccccgttcctgacatcacagcagcctccaacacaaggctccaagacctaggctcatggacgagatgggaaggcacagggagaagggataaccctacacccagaccccaggctggacatgctgactgtcctctcccctccagcctttggccttggcttttctagcctatttacctgcaggctgagccactctcttccctttccccagcatcactccccaaggaagagccaatgttttccacccataatcctttctgccgacccctagttccctctgctcagccaagcttgttatcagctttcagggccatggttcacattagaataaaaggtagtaattagaacactctggctcctggctcttctgttgagatccagttcatttatcctaaagaggtaactaaagacgctaaatccagtcactgaggtgggagaacgcagcccaagtaacccacagagatgcctgcggggccaggcaggcctgggggggggcttgtagtctttggacacagacatacttgattacatgtttaacacacacgaacactctacttccaaaaagaaataggctcttgcctagtttaagcacaagctcttcttggtacagctttcattttcctatgtccccaatttcatttctatactaagaacagtgtgaatgtgatgacagatggcaaccgacatagggcctccgtgtcaggatggacaggaagtaggggactgtggagaactgggtgcccatgccttacctaaggggctgactgctactcagctctatctggttgctgccaggaggaagcacagcccccgttgccagatgttatctttttaagaggagccagaaatcaagaactgcagtgaaatcaccccatttttaagtttaaagtcttgctgtgggtcaacaaggcccaatgaggacactactctgtagttctgttctagagcaacatgcttgagaggagagaggccagatggtggagggtctggccccgggccccgagtcaagggtgcagctggatgccaacctgggtctccgacacctccagccatgcattccttttctgcactgcctctggctgtttccagcatgaggctaaaagctctggagaccatctccaggacccctggtgttccacatggctctgggcccagggaagtgggcttctgcatttccaggctggagcagcagaccacctcctttgctatccctcccctccctcagtccacacccaagacatcatcctgtctttcatgttcatccacttcttgccctcaccaccacagaaccatggtgagctcgatttgaggggcaactcacttccgattttcctagacctgctgtgcctgccacagctgttcaccaggcacctccagggagcctgcccctagctcgaggcctaactcgaggattctcagccccttccatttcttgtctttgggtatttacatgacttactctggcaacaggaaatcaaccatgaccatcctttagttccatcctttagtttagatgccacctcatccaggaagccttccccaccaattcggcactcaggcacttcactgctcactgcctgtcccactaaccacggtcacccatagcctcaacatgcaggcaagagggaatcccgagtgtcggcgagacagtcccttccaagaaacatgtgccccagatgcactgggagcttgcacccttcctccaagtcttttattttttttttgagttattaaaaaaaaaacaaaaaacacaaccaaaagaactgacgagaggaagacaaagcctcgggatcagccagagaccgagcggcacgggatgaggcacaggtcaggcctagctggatctgtggagcaaggtggtgggaagtcccgaggcctttgggcatgtggggtctgtggaaggagaggaggtcacttaaaaaaatacatatactgtacacatctatatgaagcgtcctgtgttgggggagtggggtgaggtcatgggagctggtccactttctccttggaccagcctccccgcaggctcactggcttggccagcacagggacccctgaagctggctgtcttcttctgtggagcgagggaaggtaacagtttagttccaacccatggtgggcagaggtcggtggaggtcagaggcatggggatggccactgctcggctaggaaatccctaggggaaggaaacacatgcagatgtcaaatttcctgacccttttcccctgcaaggaaaatgaaatctggcatctccaatgcaggggggaggcattaaccacagtggacattttttagcacttggaatgttctgagaactgggctgagtcctttagtgtttagtttagcttcacataagcctcaccactggcccaggaggcgggctctgcatcacccccatttacaggaggctgggtgaccacagggccagcagagccaggtggagcagctaactgtcaccaccacttggcagggcctgtcctccatagggaagcatagatccatggtgatagctcatcttgagtaaaccatcttccttcccaaaaggaaatgcccccaagttacaggatcatgaggaaaatgaaccgctcacaagtgaaggaggaaccaagctgtatccgacctcacctacaaacaggctccatcccagggcacaccccctaaagcatgcacaacccctgcacccaggtgcactcggtgtcaccactgccattactgttctggatccttctgatgctgcagtgccagctcctgatgtcaccccagtggccccatggacccttggcaacagaacctctttccccagcctcctttccccttagagcccacctatcaggtctgcctggctctctgggaccacaggggacaccagagctgtcctcccaccctgaatgctcaggaatgattgggaagcgtacctgtgcctggtgctggtgctcgtcatacagtctgctctgctgtcttcttctgtgaggagggaagtacgagaggctctcagacctgcagcttttccccacccactgctgcccccacctcctgaggactagtgaattcccctagaatagatactgggtctgcagcgacctccaagggcagaggcaaacagatgttcagctctcctaaatacagctgaggccctgctggccaaggtgagaacttcatctgtgtctgaggtgctaaggccccgggccgtgaggacagctgttgttcagggctagcctgccagctggggcacacgcagcccaggcaacgtttcctttcacctggaaacctgccacagtctacctggtttccctgtgctggggggagtctctccttccttccccaacacccttctacctccggcaggccacttctacggcttccatgtgctcagggaacatgccctgccagcctcttccctggtgtgtcacaacccctgacgcccccgactgggccccgaaaatgggaagggggcaggaaccaggtctgggtgtgtaggagggggcttgggtttgggtctgttttctggcctgagacaccccaggaactctctacctttttcttctttttcttctgggacggtgactcagaatctttggttgaggccttttttgctttcttcttcttttcttttttttctttgtctttttttcctaagggaagtaaagtaaagttcctgaacaacagatggtaatcctaagtgctggggtcaatgttgggaggtgcacagggcagggctcccagctttccccacaccaccagaagccatcacaacaggccagcagggcggggcgtggaggttcattcctgcaatcccagcactttgggaggctgaggcgggtggattgcttaagcccaggagttcaagaccagcttgggcaacatagtgagacctgtctctacaaaaaatacaaaaattagctggggatggtggtgcacgcctgtggtcccagctatttggggggctgaagcaagaggatcgcttgagcttgggaggctgagcctgcagtgagctgcgttcctgacactgaactccagcctgggtgacagagcaagaccctgtctcaaaaaataaaaataaaacaggctggcagctgtggtgatcacccagcagggccagttcacctgccccctggaggccagctcatgatttctgtcccatccatggaccacctggatgactaccatttttctttagctcaactcactttttaaaactcccgcaaatttattttaaatggacactatctatccctactgtaaatggaaatctagcacagttctgagcaccaaggggctgcaagtcctgctctgagggtgcccgacttttgttccagaacgagctggctcttcgggcgtcactggcaacccaccgtccagggcgatgctcgagagtgctgcctaggtttgactctggctccacctagcaaaactctgtggccctgaacagcatctctacttctccgagcccgagccgcagttttctacctgctgagtctcatttctacctaaatgaggtcctgctgcatgcggagtctagaacagcactcagtaaagggccagtgttactatggagggaaaactgaggtctagagacaagatggggtttgggatgaggattctgacagtctggttcctggtccattctgcacccaggagctggctggagaagcaggttcctccaagatctgctgcactgggcttggggaaagaggacatgactcctcgtccttctggagcattcctggcagtgctgactcaagtgctctggaatcgagttcgggctttgccacaagctgcccctgtgactctggacaaaccacttctcagccttttttttttttttttttttttttgacagtcttgctctgtcacccaggctggagtgcaatgcgtgatctcggctcactgcaagctctgcctcccgggttcaaacaattctcctgcctcagcctcccatgtagctgagattacaggtgcccgccaccacatccagctaattttttgtatttttagtagagacggggttttgccatgttggccaggctggtctcagcctctcttttctacatgggaggaatgagaccaggtgctggctgagggtccctcccgcccccgtggggtgcccagcagcccttggggtgggctgggagaagcggtcactcactcttgtcggatttcttcttctccttcttgctctttgggttgctttgatctccaccttcaaccgtccccatccccttctgaagctcctcttctggctcgtccttggccccttgggagccaagagaccccttccctttcttctccttgacatcaccacttgctttgtctctctttgctttccccttggaagtcgtggaggtcttttctggggaaacagaggcctccccaccttccccggcccccagcttcttcttcttcttgctcctgggggtcctggcagctggctggtctcccgatagcttccgcttgcggctctcccagcccttcctgctgctctccttggtggtgtccaccaccttctttctttcctgttccagcagctcagtcaggaccttcaccactgaggcctgcacctgggcctcattcaggggccagggttggcccaggaggcactgggtgatgttgctttgcagcgccagggttgaggcttgggggttcccagcccctttcttgggcttccgggacttctgaggtgtggtgcctgaagcagcctcttttccacctatggagagagaatgtggggtcacagatctgggagagttgggggacagatcttatggtacctaagagcgaagagggtgcagggagtgactccatcttttcttacaatggcacagatggggagagcaaggcttggcggtcactctgccccagctggtctcctaagctcacacctttccaccaatttcacaccctgacttcatttctaacttacagcttttccctgtctctttatactaaaaactccagttagggtgggggacagaaaatgactccagaatgttaatgaaagggcctgaaatctatcaatggaatgaaaattcagaaaggagggagatggagtctggagctgggaggaaggagacctgggttctaggtctgactttcccacccactttcagtgtgattctggccaggacccatctcctcccagggccttggtttccctgtctataacgtgaggggtggatgaacagtaaggcttcctatgatacattgtagatttataataaaagtgggggccatgcagacattcaactgatgattacccacactcggcccttcctggtcagggggtccaggcaaggtggggagctctgggtgcagtgtatatacacgtggtggctgactaagcaggtttactgcctgccagagagacttctggtgcagcctttgtttagaattttccacgcctctgcttgcctttgataattgtgtgctgactacacgtgtaaaaaaaaaaaaaccttccacagccccctctaaaatgtctccttgtcgcaccgcctctcacagagaatgttggggaagaaagtgagcagcaattcctcttccgacccagcctggggcaagctgcagctgaaagccccatgactgggtctcctcaccggctctaacttccaagtgacttggaggtctctgccccattctgggtctcatgggcacaacactcctgcatgctgggctctgaaaggtggcttggtggtttggtcctggaggtgtttgcctggaggaaggcccaggtggatactccatgtcacactctatgtggtactcatgtcacactgaggctagggctgccccctgcagcatgcagtgagcttggcccctcagccccaaccaggatttctggcgacttttggctctagagctgcggtgggctgggggaggtggactgggcagggcaggccaggttaggcagaggggcccccgggacggctggaggcccaattccatcctctggggattcttcaagatggcaggagccaatggagagggaagctggggagggcagttagccccggaaacctctctccccagagcctacgtttctgctgctgccttttttttttttttttttttttttgagacagagttttgctctgttgcccaggctggagtgcggtggtgcaatctcggctcactgcaacctctacctcccaggttcaagcgattctcctgcctcagcctcctgagttgctgggagtacaggcgcctgccatcatgctggctagttttttgtatttttagtagagacaaggtttcaccatgttggccaggctggtcttgaactcctgacctcaagtgagccactcgccctggcctcccaaagtgctgggattataggcacgagccactgcgccaggcccacttttctgctgcttatctgcaaacacccagaacaccaaggctggggaagccctggagctgtcccaagtgtgcccagctggtacatatttgacccttagctccagtagggtcagggagtgtggatgccccaggttaggtgaattgaataatccagtctgccctccaaatacaatgtgactattttctacatgtgccatgccttgacacagactggatacatcaactgctgttttgtatggttaagacacagaggtccagagtggccaggggatttccaaggctttacaatgagtcagaacagcctggggccagtctactgcctggggtctcctgcatgtgctgagtgtcctccaaacgtgactgtcagcctattgtctaagctatcctctgaggcccaaggcccacaccgtgagcctatttacagggaagaaaagttgatggtgatggttggagagagccaacacttgctccacaagccaaaagacgcagcttcctctgaggcaagggctatcctaccaggtgcatcagcaccacccagggctggatacacccccacttccaggctgtccagggccatgggagccagacacctgggcgtggggcccacctgtactttttttttgagacagggtctcactgtaccaccctggctggagtgtagtggcatgatcatggctcactatagcctcaacctcctggcttcaagtcattcttctgccttggcctctcaagtaattgggactacaagcgtgcaccatcacaccggctaattaaaataaattttagagatggggtctctctgtgttgcccaggctggccttgaactcctgggcttgagcaatctgcccacctcggcctcccaaagtgctgggattatgggcatgagccactgcacctggccccacctgcactttgatgagcatcttcaggtccaatgcaaggccacaaggtctcacttggagaggctctgggggcagacaggaccatgttgggaggactgttgctacaggagggcaagaaggggcccactgccctgtccctctgtgtcctgctatgtccctcctgcagaccttaacttacctgttttaggggacaacatgcctgctgcctgttggggctttgcctcctgcttgccatctgggtcatctttggcggccagagtagaggaaactgaggggctggagtctagcttgggagtggcttttgaggcctgggaattggctggggttagtccaggggtcatataacctgagaggagagactgaagaagcccattgtgaaagaggctgccaccaccccaccccactgccataacccagcccgagtcatggcctgctgtgaggaaagcagcctggggcctctaggatcaccctgccctatcagtgcagagtgggtggacaacaaggcacagagcagcacttcagcccttggcgtgtgcctcctgaactattttaattaatacactttctagacaggcacatttaaaaaggaaatttcttattaatacaaatggaaaattactagcttttgccacatacagatagtaaccttaaaataaatctgctaaagaatgtttttgtccggacatcacccagaatcaaggtcaatcccttctacagaccccaagggtcagctactcagggctctatgaggggacggaggcagcctggctgtggtctgctggctgggccacacgtggtgccttgcagacaggaccttgcccaaggcctctgtgaagagaggggacccagacccctgacctgagggatcgggtagacaggagcctggcctggggctccaccctaaggcctatgggctgccagtcctctcccttgcagttacctgggatggcgccaccacatcatcctcgctggactctgctgcggtctcctccaccagggtctctgtcctggagggggtgggacctactggagaagcacagtatcctgttggtagccccaggtggcccctgccagccgggaagggcagagcccttcaggaaggccctggtctctctgcaggtccctcacccccatcccctgccccgcctcaccacaagtcttcctactgcttcaacactccttgcacacttatcgctagtcacagcatgctaggtgcgacatttgaatgccaaagccttatttctaattcctgaggccccatttctatttccctgctttccactgttccagaaacatggccctggagtttttgggagccagtgaagggagtctgataccaaaaagctgagagtggtcaaacagcaaagtcaggtctctgaaatcatttggattgacttcctcatgaagttgtacaggtggggaaactgaggcccaggctcagccacaggtgcagaatgagtctgagatatggagctgaggccagagctatggctccaccaggccacacaacaccctcttcctggcccacccttgcctttcccctggcaccctcacccagcgtgtgggctgacttggccccctggggcccttcaccatcttcctcactccctgaagaactgtcgctgctgtcctcactgtcatctgagctctcaggggctttggtggcctgctggacctcaggaagcttaggttttctgagcttgttggtccctttggcctggacggaggtgctctggggacttgttgcagggagtgttcccacagcactgtcaacctaattcggtgaaaggagaaggaatggaaggaaaaattagggcaagtaagacctggtccttcctgaacacttcagtagggccaggaactgtgttagatggggcacacatgcagcctcatttgatccttccaactacgaaaggtactgtaattccttcttacagattaggccactgaggccgagggaggcaaaccaagtgcagaggtcatggggcagatgagtgctggtgccgcgatgcagggccacgcctgcaccttctacgctccgtgggcttgcttcccctggctccccaagctcaccccacttgaaggctgggtcct

SEQ ID NO: 776 - DNA, 1250 bp, Homo sapiens
acatcctgccccgcaaaaggcagcttcaccaaagtggggtatttccagcctttgtagctttcacttccacatctaccaagtgggcggagtggccttctgtggacgaatcagattcctctccagcaccgactttaagaggcgagccggggggtcagggtcccagatgcacaggaggagaagcaggagctgtcgggaagatcagaagccagtcatggatgaccagcgcgaccttatctccaacaatgagcaactgcccatgctgggccggcgccctggggccccggagagcaagtgcagccgcggagccctgtacacaggcttttccatcctggtgactctgctcctcgctggccaggccaccaccgcctacttcctgtaccagcagcagggccggctggacaaactgacagtcacctcccagaacctgcagctggagaacctgcgcatgaagcttcccaagcctcccaagcctgtgagcaagatgcgcatggccaccccgctgctgatgcaggcgctgcccatgggagccctgccccaggggcccatgcagaatgccaccaagtatggcaacatgacagaggaccatgtgatgcacctgctccagagtcactggaactggaggacccgtcttctgggctgggtgtgaccaagcaggatctgggcccagtccccatgtgagagcagcagaggcggtcttcaacatcctgccagccccacacagctacagctttcttgctcccttcagcccccagcccctcccccatctcccaccctgtacctcatcccatgagaccctggtgcctggctctttcgtcacccttggacaagacaaaccaagtcggaacagcagataacaatgcagcaaggccctgctgcccaatctccatctgtcaacaggggcgtgagatccccgttcctgacatcacagcagcctccaacacaaggctccaagacctaggctcatggacgagatgggaaggcacagggagaagggataaccctacacccagaccccaggctggacatgctgactgtcctctcccctccagcctttggccttggcttttctagcctatttacctgcaggctgagccactctcttccctttccccagcatcactccccaaggaagagccaatgttttccacccataatcctttctgccgacccctagttccctctgctcagccaagcttgttatcagctttcagggccatggttcacattagaataaaaggtagtaattagaa

SEQ ID NO: 777 - protein, 160 aa, Mus musculus
MHRRRSRSCREDQKPVMDDQRDLISNNEQLPMLGRRPGAPESKCSRGALYTGFSILVTLLLAGQATTAYFLYQQQGRLDKLTVTSQNLQLENLRMKLPKPPKPVSKMRMATPLLMQALPMGALPQGPMQNATKYGNMTEDHVMHLLQSHWNWRTRLLGWV

SEQ ID NO: 778 - DNA, 1293 bp, Homo sapiens
acatcctgccccgcaaaaggcagcttcaccaaagtggggtatttccagcctttgtagctttcacttccacatctaccaagtgggcggagtggccttctgtggacgaatcagattcctctccagcaccgactttaagaggcgagccggggggtcagggtcccagatgcacaggaggagaagcaggagctgtcgggaagatcagaagccagtcatggatgaccagcgcgaccttatctccaacaatgagcaactgcccatgctgggccggcgccctggggccccggagagcaagtgcagccgcggagccctgtacacaggcttttccatcctggtgactctgctcctcgctggccaggccaccaccgcctacttcctgtaccagcagcagggccggctggacaaactgacagtcacctcccagaacctgcagctggagaacctgcgcatgaagcttcccaagcctcccaagcctgtgagcaagatgcgcatggccaccccgctgctgatgcaggcgctgcccatgggagccctgccccaggggcccatgcagaatgccaccaagtatggcaacatgacagaggaccatgtgatgcacctgctccagaatgctgaccccctgaaggtgtacccgccactgaaggggagcttcccggagaacctgagacaccttaagaacaccatggagaccatagactggaaggtctttgagagctggatgcaccattggctcctgtttgaaatgagcaggcactccttggagcaaaagcccactgacgctccaccgaaagagtcactggaactggaggacccgtcttctgggctgggtgtgaccaagcaggatctgggcccagtccccatgtgagagcagcagaggcggtcttcaacatcctgccagccccacacagctacagctttcttgctcccttcagcccccagcccctcccccatctcccaccctgtacctcatcccatgagaccctggtgcctggctctttcgtcacccgcccaatctccatctgtcaacaggggcgtgaggtcccaggaagtggccaaaagctagacagatccccgttcctgacatcacagcagcctccaacacaaggctccaagacctaggctcatggacgagatgggaaggcacagggagaagggataaccctacacccagaccccaggaagagccaatgttttccacccataatcctttctgccgacccctagttccctctgctcagccaagcttgttatcagctttcagggccatggttcacattagaataaaaggtagtaatt

SEQ ID NO: 779 - protein, 230 aa, Homo sapiens
MHRRRSRSCREDQKPVMDDQRDLISNNEQLPMLGRRPGAPESKCSRGALYTGFSILVTLLLAGQATTAYFLYQQQGRLDKLTVTSQNLQLENLRMKLPKPPKPVSKMRMATPLLMQALPMGALPQGPMQNATKYGNMTEDHVMHLLQNADPLKVYPPLKGSFPENLRHLKNTMIDWKVFESWMHHWLLFEMSRHSLEQKPTDAPPKESLELEDPSSGLGVTKQDLGPVPM

SEQ ID NO: 780 - DNA, 1468 bp, Homo sapiens
acatcctgccccgcaaaaggcagcttcaccaaagtggggtatttccagcctttgtagctttcacttccacatctaccaagtgggcggagtggccttctgtggacgaatcagattcctctccagcaccgactttaagaggcgagccggggggtcagggtcccagatgcacaggaggagaagcaggagctgtcgggaagatcagaagccagtcatggatgaccagcgcgaccttatctccaacaatgagcaactgcccatgctgggccggcgccctggggccccggagagcaagtgcagccgcggagccctgtacacaggcttttccatcctggtgactctgctcctcgctggccaggccaccaccgcctacttcctgtaccagcagcagggccggctggacaaactgacagtcacctcccagaacctgcagctggagaacctgcgcatgaagcttcccaagcctcccaagcctgtgagcaagatgcgcatggccaccccgctgctgatgcaggcgctgcccatgggagccctgccccaggggcccatgcagaatgccaccaagtatggcaacatgacagaggaccatgtgatgcacctgctccagaatgctgaccccctgaaggtgtacccgccactgaaggggagcttcccggagaacctgagacaccttaagaacaccatggagaccatagactggaaggtctttgagagctggatgcaccattggctcctgtttgaaatgagcaggcactccttggagcaaaagcccactgacgctccaccgaaagagtcactggaactggaggacccgtcttctgggctgggtgtgaccaagcaggatctgggcccagtccccatgtgagagcagcagaggcggtcttcaacatcctgccagccccacacagctacagctttcttgctcccttcagcccccagcccctcccccatctcccaccctgtacctcatcccatgagaccctggtgcctggctctttcgtcacccttggacaagacaaaccaagtcggaacagcagataacaatgcagcaaggccctgctgcccaatctccatctgtcaacaggggcgtgaggtcccaggaagtggccaaaagctagacagatccccgttcctgacatcacagcagcctccaacacaaggctccaagacctaggctcatggacgagatgggaaggcacagggagaagggataaccctacacccagaccccaggctggacatgctgactgtcctctcccctccagcctttggccttggcttttctagcctatttacctgcaggctgagccactctcttccctttccccagcatcactccccaaggaagagccaatgttttccacccataatcctttctgccgacccctagttccctctgctcagccaagcttgttatcagctttcagggccatggttcacattagaataaaaggtagtaattagaacactc

SEQ ID NO: 781 - protein, 230 aa, Homo sapiens; identical to SEQ ID NO: 779

SEQ ID NO: 782 - DNA, 1485 bp, Homo sapiens
acatcctgccccgcaaaaggcagcttcaccaaagtggggtatttccagcctttgtagctttcacttccacatctaccaagtgggcggagtggccttctgtggacgaatcagattcctctccagcaccgactttaagaggcgagccggggggtcagggtcccagatgcacaggaggagaagcaggagctgtcgggaagatcagaagccagtcatggatgaccagcgcgaccttatctccaacaatgagcaactgcccatgctgggccggcgccctggggccccggagagcaagtgcagccgcggagccctgtacacaggcttttccatcctggtgactctgctcctcgctggccaggccaccaccgcctacttcctgtaccagcagcagggccggctggacaaactgacagtcacctcccagaacctgcagctggagaacctgcgcatgaagcttcccaagcctcccaagcctgtgagcaagatgcgcatggccaccccgctgctgatgcaggcgctgcccatgggagccctgccccaggggcccatgcagaatgccaccaagtatggcaacatgacagaggaccatgtgatgcacctgctccagaatgctgaccccctgaaggtgtacccgccactgaaggggagcttcccggagaacctgagacaccttaagaacaccatggagaccatagactggaaggtctttgagagctggatgcaccattggctcctgtttgaaatgagcaggcactccttggagcaaaagcccactgacgctccaccgaaagtactgaccaagtgccaggaagaggtcagccacatccctgctgtccacccgggttcattcaggcccaagtgcgacgagaacggcaactatctgccactccagtgctatgggagcatcggctactgctggtgtgtcttccccaacggcacggaggtccccaacaccagaagccgcgggcaccataactgcagtgagtcactggaactggaggacccgtcttctgggctgggtgtgaccaagcaggatctgggcccagtccccatgtgagagcagcagaggcggtcttcaacatcctgccagccccacacagctacagctttcttgctcccttcagcccccagcccctcccccatctcccaccctgtacctcatcccatgagaccctggtgcctggctctttcgtcacccgcccaatctccatctgtcaacaggggcgtgaggtcccaggaagtggccaaaagctagacagatccccgttcctgacatcacagcagcctccaacacaaggctccaagacctaggctcatggacgagatgggaaggcacagggagaagggataaccctacacccagaccccaggaagagccaatgttttccacccataatcctttctgccgacccctagttccctctgctcagccaagcttgttatcagctttcagggccatggttcacattagaataaaaggtagtaatt

SEQ ID NO: 783 - protein, 294 aa, Homo sapiens
MHRRRSRSCREDQKPVMDDQRDLISNNEQLPMLGRRPGAPESKCSRGALYTGFSILVTLLLAGQATTAYFLYQQQGRLDKLTVTSQNLQLENLRMKLPKPPKPVSKMRMATPLLMQALPMGALPQGPMQNATKYGNMTEDHVMHLLQNADPLKVYPPLKGSFPENLRHLKNTMIDWKVFESWMHHWLLFEMSRHSLEQKPTDAPPKVLTKCQEEVSHIPAVHPGSFRPKCDENGNYLPLQCYGSIGYCWCVFPNGTEVPNTRSRGHHNCSESLELEDPSSGLGVTKQDLGPVPM

SEQ ID NO: 784 - DNA, 56330 bp, Mus musculus
  misc_feature (1)...(56330): n = A,T,C or G
cttggaaagtcagcagatggccaagccacccctctgcccagagtttctgttaacagtttccatggcttggggtttgtgacgttaagcctgaaaccctagactaaaatagtctgttaggatgccccacccaaacctgccccatcccaggagctatagtctcaagattcgaaataaactcactgtgcaaaagagggcaaggaaacacctgtgtttaatttggtgtgggtgtgaagggaatcttcccaggaacacgatcacaggctagtggctatgctgtctgaatcagcgaggtgccagtgtctagagatgatctgcagaaggccagggacatccccacgggggaacaaaactccagctgagaactcagaactgtcttacaacctactgggaaatcgagcaacattaccttgtttcttaattaatgttttacaccacacagtagggccagtacagatggtgccaagtatgacaatctaccccaaggacccacatggtggaggagagaagccacactcacaagctggcctctggactccacctatgtatggtgatgtgccacactgatacaaactcacattaaacagacagacaaatgtaacaaaaatttaaagtaagtaataaattgtagtctcccctccctcagcctgaaacctgcttgctcaggggtggagcttcccgctcaatcgttctgccacgcccactgctggaacctgcctctttgctgttcggagccgtgcacgtggtcaccctgctattggactccaagattaattggcgggaatcgggccccttcccctgctttataactgcgtgtggaacagtaaaattgagctttgatcagaatgcctgtcttagctgcatttctttctctcaccgcctagcccctcttctcttccaggtttccaaaatgcctttccaggctagaacccaggttgtgatctactggccagacgcaacaataaatcacacactatacaaagtacaaggcaccaaaactataggcagaaaacttcacaggtgacaaagcagatgaccagggctcaggggttacagttaggagacaccggaagtccacctctgcctgctccttcccgtttcggttgagctggcagtgccctgtctcagctgctgtcagtcttcattggcccatcttcctgattttcttctttttcccagggactggaagcacatctttaccttactcacaaagaaggaaataaacagtcccaccctctgctccaccactctcccagccaaccttcttgaaagtcaatcactgtgacttcctgccatccactgggccctccccagcccttctaaaaaggtcctaacccaggcgttagtgcccgagcaaccaggtcaccaaacccagtgaactgctacttaccaactattgctgaggcactaagcaatgtgaggtcctcctccagaaattctctccagaaattctctgtctctggggcacagctttctgtaaataaattattcttaatatatatgtagcagtaaattgatctggtagctgtatatctttacctttcattagtccacaataattacaaagataaatcagtatttgcttaaaactgtacctcaatagctgagcagttaaattatctaccttagacttctatgctcctctggctgactcccagtcccaatccatgatccatgttattgatctggctctttgggcttcaggtgtgttcccatgatttctctatagaccccttccttatggctccaaatcctccatcctccttgatgatcctccctctcttcctctctccttcctctggttgctggacatcctgccctgttgtttattctacccaaccattgggtgatcagcatttattgacaaggtagagaataaatggtaagaactgtttacagaaacttcagacaggagattcttagtataagcattacaatgccttgcttggattgaaaccagatatgatggcagagaaatcagcatttgaataacacaagggtaaactatacatagtgtacagaaacattattcctacagctttcttctaagtttcctcttacctttttgatcacttcctcccatgcttctttaagtgtttgctatggtttatatggacgtcctctgtcttagtttcttttccttcaaccaaatacaacaccctgacaaacacacccgaaagaagacagggttggttttggctcacagttcaggagtacaattcattaggactgagaaggaatgagcctaaggtagctcaggttacagacagccgggaagcaaagatggctgccactcctcagttcgctttctccaatctgtacatcccaggacccctccctgcacagggaatggttctgcccaaggttaagatgggtcttcctttatcaattcacctaggcaagccaatcctacaaacgcatgcccagagcctagagaagccctcacagaagttgtctcttaggtgattccagatcctgtcaggttgacaagtagcagtgaccatcacattccctcaagattcacttggaaaggcttgttcctatgctcagggctactgggaggtggaatttactgagggtcttcagatctgcctggaaagggataatgagacccctatctcttcccttcttcctgtccttccttgagtgaagtgaataatcttcctctatcataggctttcaccaagacaagctttaccacaggcccaaagcaatgggacctgctagtcaaggaagcatcaacactgttagacaaaacaaaccattctcaaggaacaaaatacccatggaaggagttacagagacaaagtttggagataagacagaaggatggaccatccagagactgccccacccggggatccatcccatatacaaccaccaaacccagacactattgcatatgccagcaagattttgctgacaggaccctgatatagctgtctcttgttagactatgccagtgcctggcaaatacagaagtggatgcccacagtcatctattggatggaacacagggcccctaatgaaggagctagaaaaagtacccaaggagctaaaggggtttgcagccctataggaacaacaacaatatgaactaaccagtaccccccagagatgtgtctctagttgcatatgtagcagaggatggcctagtcagccatcaatgggaagagaggcccttggtcttgcgaagatcatatgtcccagtacaggggaatgccagggccaggaagcaggagtgggtggattggggagcagggctgggggagagtatgggggctccgcagatagcatttgaaatgtaaatggagaaaatatctaataaaaaaacccattctctttattagttgcttaccacaggcatctggtatagtgatgtaaatcttactagaggtgtctcttcacccactcaggatgctgttctaaactccatctgagctgtatttcttcctacacaattgacactgtgcccctaaggacctgccttctttaaggatctatcacttgctcatcctaatttgtggtgtattttccacgggtgtaaaactctctggaccaccaacttgcaaaacagtaacttgtagatgttgagagaaaaactacaatgtgaataataaacattcctgtatgttaaaaaggtgacaaccctatgttttcaataagattgaagaaaggtgaccgattagattaatcattaaaaatactttttattgaacaaggtgacattcacctttaatcccagcacttgggacacagaggcaggcacctgtgattttaagaccagtttggtctacaaagcaagtttcaccacaccagtcagggccacagagggagactctgtcagaagaagaagaagaagaagaagaagaagaagaagaagaagaaacaaaatataataatctttaaacaatataataataaatacgtttaaaaatagataaatctgtgaatgagacgtttaattcgggagtttagagaatcgcagagtggtgcacatctgtaattctagtcctctgtgagagcaggtgatcacaagttcatggccaagtaggatcatgtcataagaccctgtccaacaagcaaacaaacaaacaaacaaacaaaaaacactaccaaaatattaagaggatttatgctgaactctctgttgtatggctggcaatatataacttatattcataaatgcataaactcataaaagaaaatactaacccttccaatcccaacaagggaagaattttcatagttctatttgacaaataggattaaacacaactaaaaagatcctgcacagcaaagaaagtggaaaccagaatgaagatggaaccttcagaataggaaaatatttatctttccaccagattggagagttatagctagaatactcaaagaattccaaaaattaaacaaaagaaaccccaaatcacttcattaggaagtgagccaatgaactgactagactgttaaaaaacaagaactagaaatggccaataaacacttagaataatacaataaataatggagaaggtgttcagcatccttagccagcagggaaatggaaatgaaagcgtcttcaagattgcatctcaaccctaatcagagtgactgtcatcaaggaaacgcatgacaacaaatgctggcgaggatgtgggggaagggagcacttttgtgctgctattgtgaaccaggcaggtcaacatactccagaagtacctgcgtgttcatatttaatactgcactattcccaacagccaagaagtggaagcagcctagatgtttaccagcatatgaatggataaagaaatgtgctttacatgaacacgaattctatgaaattttgcagccataggaaaaaaatgaaatcatgacatttgcagaaaaataattgtatctggaaaacgttgtgtaaagcaaaataggccagattcaaagagataaatgccatgttttccttcgtatgtggagcctagatttaagagtaagtgtatgcatatatgagtgtgtgtgtgtgtgtggtgtgatgtgtgtgtgtgtgtgtgtggtgtgtgatgtgtgtggaaggtgatatgtgtgatgtgtgtatgtggtgtggggtgtgtgtgtgtgtatgtgtgtgattgtgtaggggggtgatgtgtgtgtgtggtgtgggatgtgtgtgtgtgtgtgtgtgtgtggtgtgggatgtgtatgtatgtggtgagtgtgtgtgtgtgtgtgtgtgtgtgtgtgtgtgtgtgtggtgtgggatgtgtgtgtgtgtggtgtgggatgtgtgtgtatgtggtgtgtgtgtgtgtgtgtgnnnnnnnnnnnnnnnnnnnnnnnnnnnnnnnnnnntgtgtgtgtgtgtgtgtgtgtgtgtgtggtgtgtggtgtgtgtggtttgtgggggggtaatgtgtgtgtgtgtgtgtgtatgtgtgtgtgtatgtgtgtgtgtttatatgtgagtgtcggtcatcaaactagcaaaggactcattagaggaaaacaaagaatctaggggaagtgagaactaggtaatggaatatattaataagaaagcagaaagaaagacttagaggacaaaaaagaataaagggagccatttggaaggggggcagagcgaggatgacagaggagggaaagaataagaacaaagtatattgacacaaaatgtatgaagacaccatgctgaaacccactgttaaatcaacaaaagtagatctgtgttatatcaaaagagaggaattgtcagtagcatcttaccttgatgtttaatggttgttcatttaaaactatatgctattttagtcaatggtactctaaaaataattttgaggatatctcggtccctaagaagctaattaacacttggagtcttacagatctcaagagaaaaaaagtaattcattttgaccgccatgcagtcatttttgtccagacaaaatgaaaaagaaagttaaaaagttataaaaagaaagttcagagaaaaaaatctttgaagcatgaaaatgctttattttagatttacctgaaaatatgtgtttaaggagaagagggaaaactgtaaaactcctcctgttcaagaagagcttgttcgtgtgctttcagaaagatgacagtgggtggcagatcacactggcaagcagtttctactgcaagtattgaagcgagcattgtaacaattttctttaagacatttaatatttgatgtcaccaaaagtgacattaaaaaatgtccaaacttagaagaaatgatttttcatatccatttgaatgtgtgaggataaatgccgtacaatgtcaattatgtgagagcaaggttgccctccaatgtggggccagactgcctataaggaagcacagcaccttccttccatgcctggcattaccctcctaacctcagcagggtttggctagttcccaaacgctgtcaaatggtagacctaaaatctacatattttcaaagacttattttaacgggggaaaaaaaacataagcaaatatttggactttaatgtcacctatgctaaaaagattggggtaaaacacttgtaaagcaaaatgaataagaggtttacaagcaggacagctagccagacagtggtggcacacacatttaaccccagaactagggaggcagagacaagcagatctctgtgagttgaaggccagtgtggtctacagagttcctagacaaccagggctacacagagaaaccctgtcttgaaacaaacaaaaactagaaacacagtcgaacagctgtacatataagtaaggagacgaaaacaggatgtttattgggaaatctacatgatggtgatatggtgtttgctgcctgatattttgagcttgttttatatctagaaatactaataataaaatgttgcaggggacgaagaagagaaaatattttccataatcatttttttgtacatgtagtgctgtagcacagtagcgctggcaatcagtttaaaggttaatgtccttgttgtgacatttaatgtatccattacttgaatataataatgtatcttaaaattaggtaggatgctcttagccatgatgacataggatacacacacatactaaaatctgaagtcgatctggagaagtggcgggtggttaagaaacatgcttcctgcacttccactggacctggattctgttcctaccatcttatcaggtgacttccaagcacctataactccagcttttgaggatctgacagtctcttccagcctctgtggctacctgcacacacacacacacacacacacacacacacacacacacacacacgcactcacactcacacgagggtggggggggtggtctaaaaactagagtcaacagtagcttcggaattggagtaatgtcatctatagcctagagttttttcaacatcctgctttgttgtcctcagtgttgggtctgtcctagcctggtatcaaggatacaacttcaagcaaaagtctatgcccaacaacaatgagaagagagagcaacaggttcccaggagccaccgctcccatcccattagcttcaacacctgtctgcttattttctgaactacaagggtaaaggattgccttaagttggggagtagtggctcacccttatcttaagccagccctgcaaagcagcctaagacctaactttgtgaaggggaacttttatgattaatttcaatcaaaaatttgatgagctctagaatcagctgggagacacaagtgaggtagcttggttaggttaattggggtgagacctgcccactgcaggtggcaccattccctaggttgaaatcctgctccaaaaccaagcatttataactctctgattcttgacattgaatacaatgtggccagctcaagttcctgctgcggtaacggtaacttccatcgcttgaactgtgagctggttcctcctttgctgctttatcacagcaacaggaaaagttactaagctaagggttcagtacatactgcagatctaaaagtgtcacgttaggcatgcaatgaaacatttctagtaaatgcacaagggttacaggatgagagaacaatggatttattatatatcataataggaattctgtttccagagactacagaatatataatctgtaaatattacagacataaaattcaacaatgtaacacaacagtataatattactgttccctcagttgatttactgaatgcctactggatagtagagaccacttattaatttagttcctctttcaaagcaaaaccaaggtgagagagagctataagtgtaactgaaaccagggcttcgcctccgcatacttaatgacttcatctttgtctccagttcactgttactaccagaagcagcactttcatttgccttctcagtttcataaataaaattcactagcttttcaaagatggaaatatgcctgactgtaacacggaagaaattgaatgaatggttggtgaggtcctggctaccttatatcataacctcatgtgcctcactgatctcactgtacatttattaactccttaatcttcacaactcttttgaagcaggttgtacaatctccatactgagatgggaaagagaggccccaagataatggggtaatgtgtcacattagtcaagtgcctgccctctgtgatttgttctggtgagctcctgactcccctcaccttggccatctctctgactcctgctcccaggctaggttgtacttcctctgcttcctcccctgaccccctgctctctctactggcacctttttgtttgtttggttttggttttttgagacagggtttctctgtatagccctggctatcctggaactcactctgtagaccaggctggcctcaaactcagaaatctgcctgcctctgcctcccaagagctgggattaaaggcgtgaacaaccactgcccagctactgacacctattttacaaattaggatcaggtccagtcttcttgaaaagccttccttagtcaaggcagaagcagtctcttgcccagctcctagcccacccacctcaccttgttccaaaaatttgcttacagatctgtgccctccagtaaagatgtgatagcaagcctggcattcttctggtgtccccagggcttgctactatgcctggcctataattggcacttagagtgttgctaaattaatgcacaagctccctgattttacactttcctgtctcccccgtgccgtctgacaccacatattgtagacacttagtcaactgaagtgaatgcccgattcttcaccagtcgcctagcttaataaaaacaaagcaaaacagaactcgctccctttccctgatctacacatctcagtctagaccctaagaatctggacttctttcaaggcccccgatctatcaaacctagcaggatgtgagtgagaggtctgactccctttccctgatctggtgggctggactgggcagggtgggaagcagtgtcagggcccagggcctccgcctggcgcgcctactcccagttcttgcctattaaggtaacagtcctctaggaacgcagcggcaggagggagggtccccagcagcggcctccgcccgcggcctgggcgcttgcaggactctgcttaactgcagccctggacactctgcctggcgcctcaccacagagtctctaccggcttcaccgatcctattagctttaccatctgaagtcacctccctaggtttccatagacacgcaggataacttcaaccatcatcgagggcctcaagggagtctgggcacccggcactgattaaatggaccccgcgttccgggtgggcgcacatatgctcggatagctacaggagcccaagcccaccagcgtggacgaaggtggtgctacctccaagggccggagcgggtgcgtgggaccgggatctccaccccagggcgccccagccacagccagctggccgctcgcgaccaaatccccgcccgcagaccacgcccacaggtcacgcccctcccaacccgccccgcccctccaccggcgcccgccgctcccggggctcggcgcgggcctggggaatcgggagcccgccgccggggtcgcagcatggggcgttttcgcgggggcctgcggtgcatcaagtatctgctgctcggcttcaacctgctgttctgggtgagacccgaaccggcgggccggttagggggccagggtccccggggaggtgaccgcaatagagttgggccataggagagggcaggatgttcagaggcgctaagcagacaaagagggaggggacatatggagggggataggacatagagaagcttgagctaccagaggtgatgagaagaggagacacggtgcgatgctcccccgaaagaagccatcatcttcggcggcatcgcccggcgggtggcgccaggtgcggggatctagcgggccccaatattccgagggctgggggcctggcggcccgtgctccctgcatcctgctgtgtacacacacccacttctcgcgctgccttctctggggaacccggcggcccggccaaggctctgggagggaaatccctaccgtagggctgcctggggtggcgccccaaccaagagtgtgcggacacgccgcctggctctggtggtttgttgggaaaataacggacagtagagaaaattgaaagagtggggaagatcgtccttttcttgggcattggcgggggggggggtcttctgggtgggcagtggtgggtgctcttttacgaggggttggaaaatggagggattttggaagagcagcaacatccccctagggtccctgcgtacaaccagtactcttgaaatgatctcattcaactttgcagggtggtgtagacctggcagcattccctgggtagagatgcatagagacagccagagagagtgccatggccccagtctactgtgttagcagggcatagttagaggtgtaccatccctggaatactctctcccgagccctggaaaacggtcagaggcccattctgcacagtccctattggccttccagtaacagaatgccagccagtgtagctgctcagatagaccctgagggaagacacgagtctcgcttcaggggatgtgggtaactgcaggagcagagatgctttgggatgctttgaaaccactggactggccgcgatggttgtcccatctgctctgaggaggctggatggacgataagtaataaattattgaacgatgggcctcacttgtgactaccaacccatcagccctgaagcctgggtgactccagcaactctaagctcttcagagactgcgtggccatgaccaacactggctagcaatggacagtctggaggcagtacctggggacatcccctgtattttaaaaatacatatagactttgtacaacttggcttttacacccatcacactccaggaagaagactttctgagcgcccttgtgctgtattgtttgtttgtttgtttgtttgtttgtttgtttataagtctggcttaatttcgaaggctgttaattataggtgccatgttgcagtgacacccgttactctcactgcttacaacatactttgtgtgagccagggagggaagtctctcaggctgggtttagtgcttattttgtgccagcttctccagacttatcaaacctttgcagtgggttagggacagtgcgcatgtgcaagcagggcatccccatcttcatagacgaagacgtgggggatcagataggtcccacagctgttgagtggcagagacaggactcaaaggctgcctcctccatcttcatcctgtgggaggttcagtcacccagctgtcctcagaatgtggctcctgggtcaacagcatcagggctccctggggaattttcagaaacatatattttcactcagcccggctcgctgaatcagacagtgttggggaggagcccagcaagctattctagaaggcatccaggtaatctgaacccacgggcatgtttcagaatcaccatcaaacaactactagatagatgctgttcccaaagctgctactacagctaagagaacagcccacagagaacaacaaaaacaaagtaaggcagggtgaccaagtgacaagcttcacacccgggtcacaagcgcagggatgaagtagcactccagtgaagtctgagtgcctgtcactgagattggagatggccttttctatatgtgatctaagtacagagttcagaaaagcaatcccagtaccagcgaggaccctaaacaacttcatctgagagatatcggagctcaacctgggagaacggaggtgggcagagggaagccaccagatgaggagcagagcaaaggattgtgagccatccgagaggcaaagccagggggggtctgagggcagagatccaaagcatggtgtgcttagatgagggggcttgccagagtcagtgtgctctccctccatgccagagtcagtgtgctctccctccatgccagagccagcgtgctttccctccaggattgccttcccatctgttcaattagatggacagagttgtgctgaggacgtgtgtgatgtatcctaagccagccttatatagtaggggcttgaagttatttgttattcttgttattaactgtctggcatacaggaagtgttcagtaactagtatctgtctttctcctggtgtcctgactgttggcaaacagtatctgtgtatgccaagtgacttgcatgtgacttctttggtggacagctatacactatcctctcaactcagacttggcttttttcccccactaacattgcccactcccctgagagcagggattttttttttctgttatttttacattcatttccctggcccctagaatggtgcccaacacaggtactgagtaactaactctctatagtggattaatgaatcctcaggttagatacctgggatttaaacagctttcttgactttcagacatcagctgtcaactttatcaggagagctgacatgcctgtgcctgttcattnnnnnnnnnnnnnnnnnnnnnnnnnnnnnnnnnnnnnnnnnnnnnnnnnnnnnnnnnnnnnnnnnnnnnnnnnnnnnnnnnnnnnnnnnnnnnnnnnnnnnnnnnnnnnnnnnnnnnnnnnnnnnnnnnnnnnnnnnnnnnnnnnnnnnnnnnnnnnnnnnnnnnnnnnnnnnnnnnnnnnnnnnnnnnnnnnnnnnnnnnnnnnnnnnnnnnnnnnnnnnnnnnnnnnnctctgccctggtttctaacaggttttgttttattttgcttgctttttttctgattggggagctttcccaggaaggaagccctcagctgggacttgagtatcttcacaaacccatagatgtcttcccttttgaggtctagggtccccgccccccccagtgacagtccttcctgtcctgccagaagttggccaggaggcaggcacggaggctgtagagtgtgttttgtggtctgagagtcagatttggaacctcatcctggcagttggcttgccagtcctctcagctgcgcctctggttttccaaaccgtcaatcagacctttgagaaccagcacaggaagccaagctggactcacctcgggttatgaatgctttaaaacctaaagtaaagcccagtccttagccttactgtattaatggagggcgtctgccctgtgtctgccaggtctgacttcaggatctaccatcacaatactcggtatagtcccgactgcgttgaaatcacctgtttttccttcccctctgttgcatagcaatataaacaaaacactacaacccacccagacacatatgttggttggaagaaaagcttaggcactgtttattccttgatttgttgttgtctgctcagcgttttcctatcattgtgctctctgggctgctcagggttgcctccaacaggaagcaaggctgttcctgcttgaaagttacatgccatatatggcatgtgggaaggtgctgtcctttcttcctcaccatgattaatgcaatgttgggttttcacttggtggtgcctactaggtgattctgaaaagacttgcctctttggctggagagcgaatgctatttggctcacagcttatggttcctgctctgccccacacatttcaaacatttcaaaagtggcagagcagccacttgttagaaaagatggtgcaggaggagggggaagagcctctggcgtctctaggacagcctgcttgtccattcataacctgctctgctgatttctattgaagtgggaagacagatgctttggcagcctctcctactgtgcaccagaaggacctagagacggtgggcagagcagagtgcacagcatggccagtctggagaggccagagctgtagtcttagtgttgtggttgaccccaggctcgtgtatgcagtacggccattcaaacctagaaaactaaagagtgaacgttggattgtggtaccaacctgccggagtttattcccagttctgtaggtctcacaaccctggggactgggttcagctgtttggcctctttgagcctgcatcttctcttttgtaaaatgagcatagtaaagtagtatgcaagtcaccttgtgagctttatgtacataaagcccgccaatacatgtacagtcagaatccagtgtgcacaaagcatatgcttaataatctaagttctgttagtgatggtggagttcaaacaatagagacgcaggcgggaagacaggacttataattcaggaggctcctcaaggaaacagggaacaaacatgtgccctacattcagccagtcaaaataactagtcttatggcttctgaaagtcatggagtgttccctctatgatccattcactcagccagcaagtgctaggtgcttgctatagcctgacttcctgaactgtggttgaaagattaaaaatccctttacctagccaccatgttgtctttgataatagctcatctcctgtctggtctttgcccttcgaaggcattgactgttataagctggcatcctctcttctggtcccttagcatctgaaagattcaacagggttctagataaaagttcacatggagaactgctaggtgcctgccatgcttctgtgctaccaagggaaggagatggcacaggctttgatggtctgggcctctcctagtataatgtgaatgttaatacatgagaccctattcaattatctattcagactaagtaggtctaggtctgtacctataacaagctgcctggtgaggctggcacaggtgctctaaagacactttgaggacccttgtctgagatgcagtctcaagagctcaaagacccttgtttcaagatggcagggtgactcttctagttaccatattatcattattgtcttaaggattcttctacactaatccttggtagtcctagaatcactgtcacaagatgcatctcatagtgttattctagaccaccctgtctggagtatctctggaaaacctctatcctctggtcttcacactgacagaaccttcacaacaggcttgttctccttgttaaagcaaaggtggaaatgcggcaggagtgtccagcaggcgggagcaaactttacagatgtatgggaggatgttggcctgcctttctcaccatctccagctttcagtatgagagaaatcaacaaggcaaattaacatgcatatgaagttttggtttacaaaatgcttccacatacatgatctcatctgataatgaatcgttagtggcctctgtcttcacagtctttatatttttaattttcacaataatttaattagccccattttacaagcatggaagctgaaaggtgcagtagctagaatgcccaaggttttctcctttcccacgttttcacattatcaatgtattgggatgtggagtacaacttataaggaaatctatcagaggatggggagatggctcagtgggtcagagcagttgctgcatatgcataagaacccaagctccaatccccagtgcctctgttaaaagctgagcatgctccaggaacccagcactgtgtggggtagagacagggagatcactggagcttccaagctgctgtcctagctccagattctatgagaggctttgcctcagaggaataagacagaaataatagcacacctatgtgatcctttgaccttggcatgtataggcaccaggtacacatgcattcacatacacacattcacatacacacaccaaaagaaatgaaaacccactagactcagactcctacctataaccctagcatgtagaaggctgaggcagaaggattacctagttcgtggttaagtaagaccctttctaaacaaaaccaaaccaaacttctgctggcgtgaaaaatacatcgcctatgattagcttgtagccagtgtcaggttcagtcttgaagcattctagaaatactggaacaaaaaggtgcataaaacactccaacctgaggctgaaacaggagaaaggtaaggaccgtgactgacccacttaaggcaggtgaaaataagaaagaaattgagagaggtgagggttttgttttgtttttttcaagaaaccattttaaaaattaatttcaggatcagaagcttgaaggacaatgaccttgcccaagtgtaagcctagcagtacggtactgctcctgtcaacacagcctcgtgtcagcccttcagccctcaccacagccctgggaagcagtaactgctctcccccaagttccaccaagaaaagggagacacagagacttgtccaggccacaaaagtggccagcagcagagctgggtctccagtcaaggctcagcatctttgtccttagcctttctgagtccccagactaacagggagctgggatgaacctgtaagtgacttctacacctgctcatccaacatggtggccatgctactgaatacacagagctgtctaggcttaaaatgaaataaaatgaaatattcttgccctcaataccacctaccaaatttcaagtattcagtagccattagtactgagtggctacaatacaggacagcacagatggcaaatgtctataacactgagaacaccccgcccccgtgtgtgtgtgtgtgagtgctgcacacctggtattgaataggaggtgacagccgtaagctgtggggcaagagacagggaaggttgtgtggaaaacttcatgatgcatccttcatcctggataatccttagtaatctcaaagcaggttgtaagaatattaatattaagaaaatgtctagagaatgacaaccgaggtcttgtggtgtccagtatagttcatccaaggggacttcctggcaacgaagtgtgtctgcttgtcccggtatgaatctacacacaacatttactttcagctaccatttctcactagcaccatgggaaagtgggtaaagagtactaacactggtcgctattgaagggtcctggttattgaaactagggggatggctcaacagtgaaaagagcacgatgttcttacagacggccctctggttcccaatgtccactgtagtaaagtcatgactgcttggaattccagtctgacactcacttctggcctctgtgggcacctacctgcactcgtgtgcacaagagcacatattcatactagagcgtgtgctcacgtgtacacatatacaaacagacatacacagttaaaaattacatagatcttaaaaaaaaacaatcctacttatttttccaatgtcatcctctcaacctccttgaatatgaacacataagaatcagttaatataatttaatgtctcccctcagcctatataaagctcaatatagtcgagatatgacatccgtcaccagggttcctaagatcagtttgtgcatgcagagggcaagacaagaggtgcaggcccagctccagggaggaaatccagagacttagaaaagacagcttacccctgggtgagaaaaggcagccagtgggtggtgggtttaactcaaggctgcagctggctagagttaggctttccttctggggctctgtgatcttcactgataaagccttctgttccctggcattagctggaggcctgtgactttgttttgctggatagggaaagctgggaagccatcttctttctccaaattcttgctcctccctaatctcctcttcccctgtactttctaccagaaggcattgtgtccgtgcactgaataaacacgcgcagcccacactgtccacagatttactatgttctcagcgccctcttttccacccagcttctttccccacgttcttctcttgccctgaaactccagccccccccccccccgctcccccagccccagcacttgtaatccacctcccaacaagctcagctggctcgcaggacttcacttcagaacaacttcaacacacagaaaaaggcgtgcttgtcacaaatacacagtcaagtgttctttccagagaacaaaacacttctcatcctatcaaagtttgaattgcagcacggagaataaacactgagtcaccatgaagcaagctcacagggtggctcagtgggcaaagaggcttgctactaagctccatcccagactcccacatgggggaagatgagagccagctctccccaccatatgcagtgcacacatgtgcccatacgtacacacatgcacaccaagtaaatgaatgggggggggggaggataaaaatatgctctcacctgaaggaagcacaaacatccttatgaaggaatagaaggcaaatcacactggcgaagcagaagccacagccacttccaaacagccttatcagcatctgttgtcacagcagtccttcctcctagtctccacctggtcctaataccaaggacagggtaactgggtccctgtgaggccgtttggtatgaatgccatatgctattcagcccttgtagttttttctggttaaaaaaacaatccttgctcttgacaaagttaccatctgaatcctggccttgctttctctatgtaatgcaatgaaagtcttgggagccggttttccactttgagcaaattagtgtcatcttccaaagcaaatgagcttgtgacatctgcctgccacaaagctgaggcataatggggcctcaatcagatcaggaatcatgagggctcattatgagtccatctaggacgtgcgttgccaccgtgagcaagtattagctcgaatgcatttaacagaggctccagaatagaagcctcattttcaactttgtgtggcttcatcccaaaatggagacttgaaatgagctgggtttgtgtgtgcacagccttcgctgtggtgacgcaaggacatagggctggttttgtttgtctttcactgaagggcagcatgtctatctgagttgttgtagccatccgaagtgtgacaaccttgcccaggtaaaggtgcagcagatttactctttgtgaccatgggtggttctcgacacacatccctgaggcttaggaaacctgatagcccatgcaggtgtggtgctttctttttctgtggggtagtgtttgctgagcacctccaacctagtttcctagtgctgattaccaacacacacatacccaccaagagtcctagcttggtccaagaactgtcatactgacggtagcctttagaacgtgggtttaagaagaaacccattctttccacagctgaatgagtggcatctctgctccccctgccccaccttagcaggctctgagaggcagagggaaacccttagcagtcaacaactgcaagttgttgctgctctcacagagctcaggcctttaaaacccagaaatatttaaatagcaatagctatgtgagctatgaaacgacacgcatatctaggccaggacaggcttccccaaggaagtgacctgagagctgagagggaggaggagtcagccttctgtgggcagcgcacacagaagaagagcgttctggctcatgaaacagaaaaaacagatgtccccacatgaggaaagacagggagcctgactcaggcactccaggcctcttcattgtctcccacctgggtgtaagcactcgtgcttggcttgaactcctgctggggattcttatggccaagaaagcattctctctactggggctcatcagcagagctgagtagggtcacacataggcttcttgtcatgctggggactgtgtccaggaagggaaggcggggcatgctgggaaacctgcatagggagaagtgtctgtgttctgcatctcagcactacggcagctggatgaacctttctggtttgcaattcataacgaggggggggggggagagagagagagagagagagagagagagagagagagagagaagtcaaccagggcagtaaaatacaatggaaatgcacgagctgctttgcctcaagctgaaggacttgtgttctgcagagagatgttatctgagagaaactttctgtctatctgctttgcttcaaaatacagtgaatctgtcttccatcccttttgcccctgagtttgagaccataaacttcttctctgaagacatctggatagttttctgtatccagcaaactctctagatcattggtagctgttgaaataacttgcccacaaatgtctgtggctgtcctgttcggtgatagcttctgggccccatctgtccttgcggtgttccagtccccttcccccttttgatttatgcatattgatgccattggttcacttgtgttcctcaaaccttccctatcttataacattttcttccttccttttgattttcttgttcccatctaagacagagtctcactatgcagctctagctggtccagaattcactctgtagaccaggctggtttcttactcacagaggtccccctgcctctgcctctgcttcccatgtgctgacattaatggtgtgcgccaccaccaccttggttggttttagtgttcttaattaatttgttcttagtaattaccagggaggctcagtcactccattgcatgagaattccatcccagggccagtgaggtgccacagcaggtgaggatgtttgctgccaagtctcatgatctgagttcagtcccagggaccacacggtggcaggagactatagactcctttgtctacacattgtcctttgacgtctgacacgtgctgtggtatgtgcatgttctccacccatacaaaatgagcaaaggactataagaagaaaagtccatttctgcagaagtgatggtgtttttcttaccattctgctagggacacggcaagcaatacctgccctagaagcagagcggccctcggcagtgtccctcgctactgtgattctcactgcccttccgggtctccttgctgctccttagcatcctctctgaggttctcctgagcatccatctgtggctgctcactgtatctggctgccaagcagcattcagctcctgctcactcccatccagagagttgagttcctgtctcccctccctcggggcctgaagtaggattcccatgatgattcaggctaagcagaagccacgagccatggctgcccccacactcctgtgatgatgatgtaatgtgctccccaacactggcctctttctcagcatagcacaaaggtaaggggtggctctttcccctgtgcagttccttctgcctcaagctttcccatcccatgaaattctttgctgctccatgaaattcaactcattcttcaaggcatatatcagaatggggatgaccgccacccaccagtgccctgtgccctcccttggtaatgcgcgctccttcccttcggcacacttcctgcatcttatcgcatgcctcactttaggtgattgtcttccaagtctcccacatggagcacagtacctggcctggctcggactatggttggttgttactaaatgtgcatggaagaagagaaagaagtgaagagagataaaagtgggggcaagaagggaatgaagaaggggcactttctcatttcttgcttatttcagttttccctgagtatagatacagaatggctaagtacaaactgggtcgaaattaaaagcattgtggcataggggacatagtgcctactgagttaaagcttaggtctaaagaggccctgagtgctggggcaagcatctcctgctgtagggaatgcgcacagtaaccgagaaccacatgcctggcagggggcttccttcctctgctctcactggaatggggttagttagtgtgattttctcacccccttgagcagtttccagtgtgcagctcaccaaccacaaggacagccaacatggcgtctcatgagcctgagaggccttgagttttcagaagggccaaagagctacacggtggctgccacgcctccttccaaagcagagactgttctggccctggaaagctcctcacccacacatccctaacatgcccacagcattctgggaggattccctgccacacagtgatgacattcagctaagccgtagtttccttgacccagagaggaaagccgtgtatgtgtggtttggggttgggggaatggatgagcaagcgtggattttttttcccccattgcccagtggctctaaattgcaacctctcttttcattttccattatgcctcaaacacatgtgtgccagaactggatggatggattctgtctgggaggatgatccagacagcaataaattagagtttgtgttcagagattccaaaaatgtggtctcgtggtagggtgtccctgacaccagtcacctcctccatagtctgtgtggtggctcctggtttgggcccagggcctctgtcaatagatcttgctttgtgtttggaaacatttgtgtctttccattaaggcaccagagagacggggaagcagggaagcttgtgaggttcactgcgcagcctcatcccgggcagcccaggcgttcctagggacaagtgtgaccaaagacatcactcctctctgtacacagcagccagagccccaaagctggcaccttcccgaattaagcacagaacaagaagattccccattttccatatgggacataaaaaccagtatgcaatgcccagtatgcaatgccttctcaaaagcgatggttcttaagcctagaagatgaatgcataattaatgtagagcccttagaagacagaagaaaaaacgtcacctgtaattccatccttcaaagataaatactattatgccgtagcatgatttcatctcaggtttccatgccagcctgctctttttttaaaaaaaaaatgtaaaaagtctttcaaaagacagctgagcctgtctttttttttttttttttttagctgccccatgaattatccaattagtgtcctctctgaggactggaaacctttagttattccccttgggagtagccagctggtagaactcagccacccactccccctcaccaaaggcaggcctgcatagttctgaagaagccaaccacacagggaattggccttgggaaacgaaatgaagaggtggaaagtcctcatacatacagccaggtaaccttccaaggtcagcaccgggtctctcacaagctgccctaaccctgagtgcattttcccttcttacacctctggtctgcatttcctccttggcttctggctgccagggtgggtgctctcctcttcacagataagagcagatcctcactgtctggtaaaaggctagggctgccccacagtaactggaagagttggcagaagcggggtggtattttcttcatctccgctgattttcccatagtgctttgcactcacaaagtaccctgtaaataagtgttaattgactgatacagtgatatccatccgagtggtgtttgtggggagagcaccttggctggggcctatgggcctgtgggtctgtgggcctgtggttaggacagtcctgtgactgacatacttagacatgtcagcttagacatgaagcctgtaacagccttcagcctcaggagaggaagcccagtgatgactcttccagccgccagcctgcctagccactgcctgcgccagccactcagcctctccatgagccacacagcacacagaccaggccttttcagaaacatattttttccgttttcactttccatggaaactcaaaatagcaacaacaacaacaacgaaaaaaaaaaaaaaaaaaaaaaaaaaaccctccttccctgcctgcaaaaccatgcttggtcaggggcagggtattggttaccatgtagcaatcaagaagagggggtcacaggagtttctgagcagacttgggattgcatcatggatatttgcatgcatataaatgcataattgggaattgcatcagcaagtgtaggtgggcccccaaggctggtgcaggtttgtttgtttttctaatttagaaggtggcttcccccaggtcttagagttcatcttgctcttggtgacttccctgagacagtggccactcactaagatgttggtgaggaaatccagaatatacccagcaagagacaataatgaaaggggtagatgcctggcagggagaatgttggaacagtgattttcacacacacacacacacacacacacacacacacacacacgagatgggggccgggggagaactttcattccatgggtaccaaataaccacaggaaaccccaagggcacagcaaacctgtgattggactcaggatatcccagagctggtcagtcatattagtgcccccgaggggcaccgagttcatgcttttacctctaagcctgctttctttcctggcaagatatgaagagtaggcaagaggggggcaaccctctcagcctgggcattgcatacctgcagcttccatccagcctatgtacacatccccctccatagtcaactctgctgtttatcttccagctagccggatcagccgttattgcatttggactatggtttcgatttggaggtaccatgaaggatttatcatcagaggacaagtccccagagtatttctatgtgggtgagtgacttcagtttccctaaaggttgggtatgagggacaggagaaaggcaaaagccactgtctaagtctctggacctatacacttctactggtattgggggatgtgcctctgtggccccttcctcctctctccaggatagaagaaggccccaggaaaactgatttgtttatttaaagaggtatcaaggaaatgtaactaaagtttatcttaaagggttagggaacacccttccttcctggagtggttcatcagtccattcaagctgtcgtgggggacccccaataagtcattattttactttgtgatctgatgttttaacatggaaacaactcaaaatgaagaaataacttcaaagttttggggtgctaatctcaaaacttctgtcagtaaagacttctgagagaagggaagactcccatcatggggacaggagagacttgtccctggagaaggggaacaggcagagcggcagcagccataccttctgccaagaaatagggtgacatagataaagctggcgctgttctcaggggcttcggtccctctattaaccctgccctgctctcctatggtggttctagcactgtcttcatcagtacaatccaaaggaggaaacagaaattccacttcaccagtcctcttccggaagtctcctgttgcagcctattgaccagacttgcattgtatatttatgcctaagagaagagacagcaaaggctatagctctaattcttggcccttagtttccttgtgcctggtgctttgttcctacaaaaaccctgtcctccaacttctgagcactgactgtgtccatgttgtgtttacaatcactggccatgggctaacagcaaggggagatgttgctgaggaaccaaggccgggtacacccacactcatgccacagcaccgagaagaaggattcaggctctacttgtggactcttttactggttttgctctgctaggtaactcatccattctcagtctgcttagcttaagggtgtttaggccaacaagctgcgggctacacaagcagtttgatgcctggcactagcattaggctgggaagtgtaagggggtcggtagaaatgaaagaagcatgttttactggagttagaagcctacagcttctggcagccatttaatcatagcagggaggagacagaaagaaagatgagcgaagatggccacggactggattctgacagcatcactgtagtctcttcgatgagtactagcctggattttcagtcatgtgtctcactaaatttccattagattcaagtccggtggagtgggtttctatggatggtcaccatagaaagattcctgacaaacatgtcacaaacataacatgaaaaggcgtctctgtgtctcaggccctgtccatccacttggcttagcttagagagcaaagccggaatgttagagtagagcagctgaccctcctgctcaccacagggagctctgcgattggtaaacacccagccctggctttcggcacagtggtcaaataccaacagaacactttagcttgactaagtttgttcaacatttctgacttaagagatcacaaggtatttttaggttaaatccaaaactgtacctgtgaaactttacttacacctcaaaccagcaacacagatggagctactcctggatctcttgcctctccagccctgtaggaccaccctccctcccactgggtgggaggctccttagctcactgatctgacctgaagagggaaacagtctcatgtagaccaggctggaatggaacttaatagctaaacccttgatcctcctgcctccacttctgaagcactaggctctcaggtgtgggccactaagcctaaatgttctgtgtatttttctttagaatgtgtttctgagtcatcagctcatacccattgcccttcggttaaagatgtcctaaacaggcttagcatgctcaagtggttcttcaagacaccaagccacagccaagtgcaatggtacctgcccgtggccccagcttcttgggaatcaaggaggatcgcaggcaagggaagaagagagggggagccatccactcagcctagagcgaggaagcctccagaaagacacagagcatagctctggggaggcagcaggcaggcttttggggattgacccatgtttgcaaagatgctctcccttttcgaattcttcttttccctccatgataatggagtttctctctgtctcaatgctctgtaccaagtgtccaaggcagacagagtggtaggcattagccaaagcagggagacacgaatgcggggaaatgaggacatggaaggaggtagtcagaccaactgctgcctgctgcctccatttgtgtccctctgggtcaaggccaaggcctagcagctgacccagggtctctgtgtcccttggttgcctaggtgaggaaggaagaggctggcaagagcggggctggcagggagaaaacctgggttacttggagtttcctagaccttctccgttccagtttctctcagggaactcaagcccctgctccttcctaattccaacaacctgcccctctgattacctgtcctggcccctccccatgttttggaagggtgaatgcctcggggtcttccaggatcatagagtggggaatggtcctctctgcctcaggaagctggagcacatgagctcatgtctgtgagccgaggatgtgagcaggtttctccactgggggtgcccacacaaacaggagccacttggctctgcagtcccagcctggctacatctgcctttccctcttcgattcagagtcccggagtctgactttgattgtggctgaggttgtgtggaaggaaagtgttccgttgctaaccattcaggggctggcttgcctttataaacactctgactcactctggtaatatttttttaacttcatatctgataccatgctagctggataacagagactaccatgtctggacagtttctccaaagccattctacaagaatcagaataggtaattatgccagaattgcagatcacaaccctgaaggagagaggggacttaaccatacccagtctcagcagcccagagctctggaccctagcctgttcttttatgggaaacacccaggaagcagcaattttagaaatctcaggaactcttctaccatttatacatggcagatttctaggtaagaaactcactgttctgtgtctctactggaaatgtagcctgggagtttggggttcacactttggctggattccagttcacactttggctggattccagtttacctgttatagctttgcagctttcattagctgcgcctctggttctttagatgtggactgtgaacgtgcataagtgcagggccaactcagctagaggtgagttatgaacaaatactaactctcagtactcacggaccgaggggatgctgaggaaaagccatctcatgagggaagacagcatgcgagaggagcagttgggatgggcttagaccagctatcacacggaccttccatcaagtgggttcttgacccgtgtcaagtgcagagtacaggcatcacctggagagggctaggccatcaggaagtggtacttcccaccagtgacatggatggaatgagacacgtaacgcacctggaatactaactgctatctggtagctcctgcggctgttatttagaaagcatctaaccctttcccatgagctcagactcatatagattctcctaaacacatagatacagccaacccatagaattggttcacatccattggttcagcatctacaaatccaagaaaccccaggtcaaagttttttttttttttaatgcatctcttctgaacatggacagaccttttcatgccattaatccctaaatagtaagcccaacaactctagaacatttgtgttgtgctagatatggtaagtaatccagagatgatttagaggatgtagggggttgtgggtgaattatgtgtaaatatgatgcatttcatgagtggctccatgcatccactggttagtatgtgaggggtcctgggactaaaccccatggagactgagtgatgatggctgtaattatgtgcgtccaagggaaactggaaggaaaacttctgcacacacacacacacacacacacacacacaatatcaaaaaaaaattagatgaaaaaccaatcattagcaggttacataagaccatctgctgtcaagatcactggcagtggcgaacatgccaatatatccactcccaagaaggattttagaagagtttgtgctgatgagccttgaacaggccctcctgatcatttgttagctgaagcaatgcctctagaagggtctgaactctgaggaggaggagagatggactcattagggaagtaggcatccctgggtaagctgctgctggtagcatctcactggcttcaccaagcccagtcattaacaataaaacccaatttcaaaggactctccgttttcaaatcaagaaaaatagggacttagaaaacataagagacttattaagtaggtcacatgtttgtcttgtgtgctctttgggagagaggactctatggaagccattttggaattaaaatgtagttataagctaattgatccatcagcagctctttttaaaaccagactttaaataaggtatccttggaagccttggggcttacactgtacagattcagacagccagatttggcaagcccagggaattcgttacatgtcgaagtttcctgtgattctctccagctccacagagagtctcattttgaacccagaggacgggcgcatcctttcatgcaaacagaggcttgctacggagaggcctcaggagcaggagctgctgagatgcttaggttgttttgtccatactggggtgttgcgtagtgtttgagtgagcacatctcctgattgttgccagagagacctagtgaactgtacccactggagagaccctctgacctaagttctcgggcccctataccctgcgagcctgtcttttcacaacatccctttcctatctcagaccttcttgggatatgaggccacatcccacttggctgacattggggagcacagcctaatacatgttcattgcaatgggacctcaggctgtgtgtctaagcaccgatgcttggagggatgaggcagtcactctgggactttgaatttatttcactgaccactggagaaatatatactgactggaggttctcacctgaagatttgtagacctgcagtcttcagaaaactataggaacctacaaaggtccaattcacactagaacaaggcatggtcaccagctgcctggagtgtagtatataatagatgagaatttagggagctggtccataggctgtgaccccaactctttcttcacactggatccaacagcagttgtagtagtagtgaccggaggcaatgacattgtaatcaagaagtcagtgtgttaacatggctctcccttgagacgttatggaaaagtgctgataggatgttgttattgctgctgcctctattgctactaccaccccttattcaactacctctgtaaggagtatagggtgggaatcaggactcttgcctctgacctcgtgtaaaatcgcagggatgtcctctttacccaaccaggctgctttgaggaaccaaggagatgatagaaacgaaagagctttgaaaactgacaacattggacaagatggtgttcaggcagtggagccaacaacactgttgtagttaaatggtatcagttctcttgtaaccacatccattccccatgaaatgatcctcttagagaaagggattgatggagctgaaatggcaggaaatgtggggtccctccagactgcacagccaacccttccccacttaggaacccacaggtagcttgaggcccttttggtctgggctgactggactgaatggtgcaggaagcagtgttgatagcttgcagccccatctaggtctgttcacagatagacctgcccacaaaccagctgtgagcaacccagaggagcccccaggaagtgcctgaatgccagagtcaggggttccccacaggggtgggacccaagtgccccaccaccaccacttccgggtgaataaaaatggtttctgggtgactcatctgactaaaatgcaaaaggaaaaaaaaaaaaaaaacagagaccattagccttactcccagtgagtcaagtgccaggcccaaccctagcattgtgctaacctcttatctcaggatgggagaaggaaatcaggaggcctggcccaggcctcccagattgccatcattcctctgtgaggaaaatcctcctggggcttgacttaggaagtgagagctccaaaacctaaagtaaggctcttgctgttgcttagggggcagaacagcttcttggggggagcagcaacttgtggccttgggacaataacttgattctctggggcccagtgcctctgtctacaaaagaaggtaacagtgtggttcagtacttcacagctatcttgagagctgctccaataaacctgcccttggtgactgtaacagcgcctgacaggaccagcctgtcccacacgtagcaattgtattaaaattctcacaaggatagctaactcctggttcaaacatgttactgctgatgatattgtgggtgtctattaccttattgttctcccccgtgggttgttgattttgatttttgttttgtaacatgccctcctgtgtgtccaatatctgtggcactgccctcaaaaggaggaaaaaattcacaccaaactgatgatagtgtgtcctatgctcctgtccttacccacatcctggctctgtcccctcccctccactccctcccctgttacccagcagccactcttgcctcccacacccttgggttcaagtccttcagtggtggggataacccttaggtccagaggacaacgggttctggggctcaagaaaaggcttgggcttgtgtcccagctgtgaggccagcttctgattatcctggatgcagtatcattggctatgtggggatggtagtgcttcctctgcacaaaggtgcacagcccaggatgaagtgtttggacttgaggaggcaggtggcagccattcattgcaacagctctgagcagcaggtagaggcggcctcttcccctcactgactgtgttctcagacaggttgcctggcttccttcaggttcagtttcctgatatgtctactgttatgaaagtagataggattactttgctgggtgagcgggtatgtatgaagtgtagacaataagtgtcaccagtatgggtggcagcagagtgttctacagagatgaaagccagagcctagctggtgtgggctgctgcacggggcttggttgccctgtcttcagtcaggctctgaatgctctccctggcctctcatccacagggctgtatgtgctggttggtgctggggccctgatgatgactgtgggtttcttcgggtgctgtggagccatgcgtgagtcacagtgtgtgctcggatcagtaagtagggtttacagggtgggcacggggtggattggcagacttccctggaaggagccaggagacccagctcctctaggacataaagccttggcactggatcctctctggtgtctgttttctccatctcctgcatgagaataatattatctttgttcctgcctcgtatggaaaatgtgaaaacaatgaggtcatcagaggaaagacatttggggaagagtgcttcagaattgattgttccttaagaaataatatttcactgtggatggggcagcttaaagatcctcacagccaggaaagaactgttatctacaaggaaagcatttctggttaagatcaatgacttagccaaacatccctctggtgccttattttaacccccagcttctgtttgaaaatgcaacaacaaaagcagtctctgctacctgctgctcggatgatgctctaaacactcaaggaggtgaggggcatcagagagatggctctggacttctcacagggggcctgaagcagggtgttctgaccctctcatttcccattcccagcagtctttgggttctccgtgtctgtctgatgcttctcatctatggctgtgtgaaatgtctgtttcctctcccagatgttctttctttctctaaataaagctgaaaaagctgtcttgtgtaccacagagctgagtttgttttatcacagagctgagggtgcaaatgggctaaataaattgaaagggtactaaattaatgacagtagtgttttctctccacagttttttacctgtctgttggtgatatttgctgctgaagtaaccactggagtatttgcatttataggcaaggatgtagtaagtaaaacctagaagtttttgtggttattaaggcagctttcttatggcaaatgatatagaatacccatcccaaaatgttaagaaacaaaataaccccccaagttatgtaagtggaaccttgaacctggtagtgtacagagctcataacgtatattagcagtttctagttcatgtataaactagtctatgtttgtttgtttaggatttccagtttaagattgttcctagttcaaaatgaggcaggcactaggttacagacaaaagaatggggcaaagaagaaggaaaaagaacccaccttctcatccttggcctaggcagggcctgccctgttatgagaagctaaatcctggactgctgcatgcacgtagcagtcctcagaacccagaagaggtcatgaggagagtccacagggcgttgagaccttttggaaggataagaaggttggggggcagagccttgagagggtcatatttccagtgaactcatgtgctgtctatactgggtgtgtgagcttaagtgtaaaactgataagcatgaaaactgagtgactgcactctatgggacattcttaacacagctccttgtacccagaggttacaagtctcaggttagctccacatagagctcaagcctgtggatttaggggtcatatgtctttgcactggaaaaagcatccactaagccgtgtgggacatctaaatgcagaacatcttccttgacagtagacacatgcctgcgagttggcagggaaccgtgtggtcatggagtccacctcatgtggctcaccaggatctcctacatgggcctagttgacagtgaagccctcctacaaataaccactccaaaaggtggctctaatgttataaaacattcttggtcagtttatccttccattttcagaagcatctcaggacctcttgaatttgtgttttgctctatatgtgcagaggccttttaaaatacagaggagtgtgcggggaatcagcgttgccaaaggacacagaggaggggagtttctttgtaagatgaaaatgtctgcaacttcccactcaccgtgccctggtgtttttccaggctatacgacatgtacagagcatgtatgaggaggcctacagcgactaccttaaagacagggcaagaggaaatggaactctcattaccttccactcagcagtgagtaacttcttctctggcatcacattttctattggctatgcatgagccaggctctctaatcacctacattaaaataaaaataaataaaataaatggaaacagtagcctttgattttaactctgatgagagccatagtttgtgctttgtgtagacctttggctagaaagaggccttctacagattcacaagagaccaaaaagcatgagcaggacactgagaaagccacccaaatgtgtgtccattcttctcagaggtgacattgtggtgagacagaagcaagcatggtgactgtcttagttagggtttccattgctgtgaagagacaccatgaccaagtcaattcttataaaggacaatatttaatttgggctggtttacaggttctgaggttcaatccattatcatcatggcagaaagcaaggcagacatggtactggaggagctaaaagttctgcatcttgttctgaaggcaaacaggagaagactgacttctagaaagacaggaggagggtctcaaagcccgcccccacagtgacacacttcttccaacaaagtcacacctactccaacaaagccacacctcctaatagtgccacttgctgggccaagcatattcaaaccaccgcagtgatcttcaagccaggaaacctcagctccaggatgtctcttagcagctttgtgacactgagtgagttagtcagacctctctgatatctcttagttcactcctcatctataaaatggaggtcattgggagacaactatatttccttctagagtgttccatgggaatgtgctagagtactgtgcttagagctacatatagtcaagaaaggcttatagaggaaatgagccagaccaaggtcgttctgttttcttaagcactgcattttggagaagtcactttgaacttctgggccacatgtttcccggtacctggctctatatgacaagagtgtcttagaaggttccccagagagggcaagcagcacaaagatccctttgtcctaagcagccagccctgaggcagggtgcctatttgtcagccagcagtcatgcctgctcttctggccttggctttcccatggctcccatcctctcatctcagatagtccctggctaatgagcccttcccaaaactcataaagcttttgctcgtcagcaggtttctggacttcagtgtgatagagctggcatgggaggtcctgctcctacctcccagctcttcatggtgggcaccatcagttagctccttgccctaccctgccccaagtcacttcatagcataaaactgttgcagctttggagaagtcgtgtttctgggttgctagcacaatcctgtgattcttcctttgctctccagaaatagcagtttgggcctcagagctgctctgcggctttggcactgccagccagcaatgacacagagccctggggctagcactcctgcctcctgtgtcctaaaacctcttcttgctctctagtttcagtgctgtggaaaagaaagctctgagcaagtccagcccacgtgtccaaaggagctcccaggccacaaggtaagctgtttgttccagggtcccttccccagcccctacctgacggaggtttttgaatgttagtagaggcagggaggctcaggccttcttcccagggattctaggaggtcccaccgcttcccagtggaccctgagccttacccatgccatacgaaataaacagcaactctggcaggttcctcatactctgggaatgatgggtcacctgccagtgactatgccatgtgctgaaggtatatgaagtgagttcaccaggacaagagttctgtgttcttcacatctttctgggacagcacagcactgataaatttaactctgtcggggattctataagtgaaagagacaagagagtccctccctcagtggcttcatagctggtaatatgcaaaaagtctgtccagggaaacacggagatacagcagaattaggaaagcttgtgtggaaggatatgagtccttgacaaagggaggtcaagaaggcagccgggagaaggtcatgctgtgggagaacaggaacccagaggaactaacgtttctgggaaagacaagctggaggtttgagaaagccatcactctcagcagactgagaagcaatatggcgtttgccttgaaaaaaatcctctctccaggagggactctttcaattctgaggtgtagctaagggccttagatactcctgtgaaaccagaagtctggcctttgtgctgttagcttagagagccatggaaaggggttggattttcattttatcgagttttctgtgatggcaatgagaaagattgacggatgatgaatatcctgaagttgaggtgacccctttgaaaagacttcgctactccttgccacccacatgatgttaactgagaaagttggacggagtggagaagagaaggcagcattggagatcagagaccatgagaagccatcactgggttctggcttctccacctgcacagaagacggtgtcgttcactgaattaatgattggaggacagataaccagttacagagaaaagaaacactatgtgggctttttgagtgtcttaaagggtctgttttaattacacatatatggagaagaaagatgtagatgtgctatggatgtagctacccaaggaggccagagaagtcagattcccctgaaactgtaactacaggcagctgtgcactgcctgacaagggtgctgggaaccagactcaggtctgctactcttaaccaggggcctttctctagctcctaattcagtgttttcaacgttgtggtttggaaaatccgacatgtggcttaagagagacattaagagtatcgatggcttcttagagctggggatgtgcatttgactcaggagattctgaagaaaagaaaagcgtgaataaaagtctaagaaacaatgccatttaagactggacagaagggggagcaggcaaacagagacactgggaggaggaggaggaggaggagtcagactcgagggaagagctgcagaggagactggctaagtgtttactgattctgcctgtcaggcactgtggatacaaagatgaatgagtcaaggtcccaccaacaaggaacctactgtctaatgggagatggaaacactagcgttgacacagtgcacagtgggggtatggacagagtttgcgtggtgctccaagagcccaggagaggcatggaggggacaccagccaaagggttgtggggtagagacagagtatggtgtggatgacagctcagctgcatctgccaccaccaccctgagcagtaattgtggagtgtcagccaagtacaagaaaaatgagttcacaaaatatgaaatgcagatgactattaaacgcgtgaaaagcatgggcaatcagaagctatctgaaatgaaagcaactttaaatgacaagaccccattgtttaacattggccttttactaataacacaatatgggtgagaaagatgtgaaatgagcattttataaaagctggcataatggtcctaaagattagtgcaatcatgtaacccagagccttaaatgaactcaggctctttcatctagaaactcagagtttattctaaagaaagggaattttttaatgtgtgcaggagctggggagatagctcagctgataaactgtttaccacactagcatgaggacctgggtttaatcctttgtaccgcagagaaatctgggtgtggtagaactgcctgcgattccagtgctgggaaagtgaaggcaaatgatcactggggctcgatggtcagccatcctaccctaattggtgaaccccaagttccgtgagagaccaagtatcaaaagacaagattggcagcccctgtggcaaacatacacacaaaggaaaaaaatggaggaaaatgcagatagaaatttttgtgcagtggtatttattacaagacatatacattaatgaccaaatactgatttcctaacaggcaacagcaggatattgcttaaattatgatcctttcatagaatatgttttatggccactaggaatcccaatttcagaagtatttaatataaggccatatttttagtctcttctgttaagtgtgagagcacacagatcactatgaaagtgaaccgagtgtggggggtcggtccttttatgcacaaagaatcatcaacagtattagttttgatcgtagcagaggacagatgtttcttattttcttgttattaatgtctattttccaaatctcaatgactctgcattcccttgtgaataaggaaagccagtacatgttttataatttgtttttcacaaaagaagccgtctgtgaatggaaagacaggctgctggcagagctggaggcggggcagcagcaggagacaggttgctttgcttgctttagattgaaaatactgagtgagctagtgagcctggtgtcacttggaaacgttaatggagataacacggctgagtgcatgggaaggaagggaagagggtggctggcaggcttcctgagagagtgagacccagagccagagaaggagctaaccttccacagagcagaccgatgctttggctctgaggagaggaagttggaaaggaattcttgtaccttttcacactctctcactaccttcaacagagcctggcacagagggaaggcagtcccgagtcctggtgaagggggaaaggctggaagggctgcggatggactgtggctttctttggcatgccaggaactgctgtctccagcagtgctccaggctctcagcagaatgcattatcgttcctctgggggtctgcatcctctccaccaggcccctgagagcagaggaagctatatcttactgctccacacccaccaacgcactccagtggcttagatgagatctgcagaatcactaaatataaggggaggcatgagagtggttaccatttgctaactaacgtatgcggatgtcagaggatgctaaagatttgtgtgccctgaggatgcatctgggctgagagtacctctgtgtaggaagtctccaagtggaagtgtttgtcactgggaagctagtaatggttacagacagtcccctctgcctcctgcccagcttacctcaccttcctacccttccccgcctccccaatccctgaatgttcttccaacccctgattcacagatttcctaagggtcaaaggttggaaccacagcccagctgacactggaggaaatgctcttctgactcccaagacctggttttcctaaggattggttttccctaatttaatttgaccccatgcagacttttagtctcttaataagttatgtataccttacatagtcaaatacatcaagtgtataaaattccttttaaattgtaaatgacaaagaggaggttataatttagagaatatcgcattttatctttctttactgaaagtaagaaaaggcttaagttttggaatgccgagggggtggggggggggggagttgactagaaagttttgtagcaccatacttcagagctctgaagcagacctttggcctaaatagataatcttacccaaaaagagagacttgtgtttgcccgacactgtgtttctgcttcacagctgtcaggctgacgttacccatgagggatggtttgcacgtgagcagaagcttacacgcattaacttacagacccagatagcaaagggaaggattgggtcatgggatgtgtcacacaatcagtttttatggatggctttttttttttttctaaacagaattgcatcgacaaaattgaaaccgtaatcagtgctaaactgcagctcattggaattgttggtattgggattgcgggtctcacggtaagaaagttctagaatgtcttctttttttttaccttctaagaagcagtaaacccttacatagtatttctcttccaattggagatggctgtatctcataatgggtaaagacttttgttcacagtacatctcctaagaacaaagttaatgacatacatcagtagtaactatataaaatatgacacaaattccagtatccacccaattatgaccttgaatttgtcactgaaacaacttcccatgtaagcctgccgccataaccttggtaagtaatctcaattcacagtaacagaacagcaagtctcttcatctgagcactggcaggctgcatagggcaagcactggtatcacacaaactggattcacctcctggctccactactttcttataagccctggggttgaaggagagcgtcttaatttcccctaagcttctatagttgtagaatataaattttaaacataccagccttacaggattatgaaggtcaagtgggatactgcctataacctattgttacaaattaattggcataaaatctgaatgtgttgcatttaataagtaccatctttctctatacttttattctgggcaaacctggaattcaagcaaagggagttatcacctgtaaaggagagaagcatgctctagcatcagccgttggtggctcagtcctttaacagcacaaaagaagagagtatgggagagagactggggacaaagctgctgttagagtgctttcctggcatttacaaagtccttgactcagttcccagtactgcacacacctgtggtccagccacttaggagatggtggcaaaaggatcagaagtttaaggtcatctcctgctatgtagtaagtttgagacatgcctgggcttgctgcatgagaccttgttttaaaaaatataaaaataaaaataaatgcatatgggaagaattggtagccctggacaggtacggtgagaatggcaaggaaggccatcaggtccacataattgaaggtttgttgtgctcttctgagaggcagaatatcaggcactgtgtttgttagggttctcttgctgtgaagaaacaccatgaccatgataactcttataaaggacaacatttaattggggctggcttacagtttcagaggcttagtccattatcatcatggtcagaagcacagcagtaagcaggcagtcatggtgctggagaaggagagagttctacatcttgatctgcagacagcaggaaactgggtaccatattgggtgtagcttgagcatatttgagacctcaaaacctgcctacatagtgatgcacttcctccaacacggccacacctcctaatagtgccacttcttatgggcaagcattcaaacacatgaatatgtgagggccaaacctattcaaaccaccaaaggcatcttctaggcctgaaggacctgtgatgcagaatggatgaggaaagattagaaagagatgagagtgaagccagagcctagcgaagaaatgactactgaatttgagcaatggtagctagtgttaagatagaattttcttgctagtctatgtgtggattatctcatagtctaaaaggcagggctacaaggattttgaagaaatctacaactggtagttcttagggaatacccaaggacttttcccattctttatatccagaacacagggtgtggcaatgacagaaatactatgctgggccctccaaattcagggatatctcacagaccctccccaacaagctctggggctaacctcagcgcaattctacagctctctagtgatgagcccgaagtagcatcttagtcagagttactattgctgtgacaaagcaccatggccaaagctacttggaaagggaagggtttatttggcttacacttccacatcactattcatccttgaaggaaatcaggagaactcaaacagggtaggaacctgagtctggagctgacgcagagccatggaggggtgctgcctcctggctggcttatcgtggcttgctcagcctgctttcttatatcccccagggatagcactacccataatagtctgggccttcctctatcaaccactaattaagaaaatgacctacagccatatcttatggggccattttctcaattgaggctccttcctttcagatgaccctagcttgtgtcaagatgacataaaactagtcagcacagcaatttgaaaacattccacaaaatggaggtatcaagtagactgtactaacagttgtatagcatggaagcagccagccctgactcatgaccacagcgatctgagagtgaaggagtctctcagaaggaacccctcagactatacccaggatgggtggggggcatgcgaacctgttgccatggaaaaggagaactgctcttgcttgtctgtcttgagtcttgagttcctccaggagtttcctccagaggtcttgctccataaggtgagactgcagtgtaatcacttacccgaaggcccactgggtatctccctgccacacactgctattgggatcaggggctgacggcctgacatccttgctggctgagtccatatctccatctgcctctgccctcctagaataactcctgccttgatgcatcaaacatcctcagctcctcagctctcttagacggggctgaggagagatccagaggcatggcaccacattctcaaagcacacattaccagtcattattgagaaatcacagacagggctcctctggctgtgggcttgtagaggtgactgggaaccttctggtattctcttcaaaccacagggacagtggttccatccaggtactcggcatctcaaagaactatccaagagacagaagaagtcaggaatattatagctcaatcgcttttagaactactggcagttttttgtttttgtttttgttttttgttttttggatttttctgctttgttttggttttggttttggttttggcttgtttggttggttggtttttggtttttcgagacagggtttctctgtgtagccctggttttcttggaactcactctgtagaccaggctgacctcaaactcagaaatctacctgcctctgcctcccaagtgctgggattaaaggcgtgcatcaccactgaccggcagaactattgagttaaacagccacatatcatttgtgtaggaatggaccaagaatgaagggaaactgtttgacagggctccatggctataggaatgaaagcttttctgacacttagaccataagcacttttacgtaagaaattaagaactattttctgagtgagtaaaatagatctgagattcatcttaaatgtaaaattcaaaaaccagaaacatatcagtctttcataactgttaagaaccataagccagaaacagacagacagacagacgtgtctgttaggaaggtaacataggagctcggcaaagcggacacagacgtcttgcttagttgccatccttaagaaacatatgaaaatgtcatttacagccagtgttgttggtcagtaacttgaactaagcagtgccacagtgtgctgatttttatcgaatccacatgtgaaagttgctaatgagcggttctttctgttgcagatctttggcatgatattcagcatggtgctttgctgtgcaatacggaactcacgcgatgtgatctgatgatacttcatcaggaaaattgcaatctagagttgtcgtgctaattatcacaagagctctctcggctcgtttttaatattcaggatattagaagctaaaataattttctgtcaactgtatatttgcacatgtatgtaagtctgactcattactgatttgccccttgagtgaatgtctgtttctggtatatgcattgcacatactgatatctgtttcctgggaaaccctagttcttgtatgcaagaataacctatttaagtaccagaaaaaaagcaatgagagatttttaaaactcggctattcaggaaatgtaataatgggtccatttctcagattttagccatgaaaattagatacataaagagaatgcaggatttctagttaatggaagcaataagatagaagaattgaagggccatagattgactgtgtctgagttgagtgtaaagatttcttgaaatatatatatatatatacatatattctccccagaatccagtaaaccacagttttagaactaaacacatctgtaaaagtaaatatagcatggaaaaatctaattcaaaaaagtcatgttttcttagcatttaaaaacagaaagcctctctctggaaagagaagtcacgcagacagacaagcatgtgccccagaaaagtgagtgctttaaagactaaaactaacaactttgaagggggagaaacactgctataggatgacatgcaaacgttgttttctccctcttctctgccaactctgctttgaactagtgaaggcctcgccttcccacaaggcctttccttcaccctccttactgtttttttcagatgtggtgacagaggaaagcaggcactgtgcagcgtgacagtgggggactctggctggcactgtctgtacctctggaatacctcatgacttgagtttacatactttcctaatatttttccatttttcttatttatctgtgcagagaattctttatagattaagaacatagttttattctttaaaataaataaatcgccccataactcagatattatgttatgagtaccctgtctaaaccaatataaacaccttcttcaatatgtatgcatacaacaaaggcaagttaatggatcaaaagtactttcgtgcatacagctgcagcacaactatattctttctcagcgaacccctgtggggatgaatagatgctcaggttctttgggagcctgagtgattgattttaagtggggaaacccaggcactgctcggccttttggcagcaagtgggaaaccccacagcagggtcgaaattgatgtatttgtcataatggaacagcgtataaaggagtcttaggattatattgaccacataaaagtgaaggcatgaggaattctggaaaccgtcaggctagcttctatgtccgctaagaacctaagactttggtatgtgctagaacaaagtgccatgcttcaggaaacttttaccaagtgttttgctgaggacacacaactcctgggatgtctcacccacagagcgccacctctctctttttcagatattcttgctactgctactagctttggagaaaaaaactgagggagttaaaagtataactgtgtatgactactttacctatgtatgcaaaagtatttaaaaaaaatcactctgtgatgtttataccccagtggttgacaaatgccagctttttaagcaaacaaagagtgatcagtccttcttatagctttagtttatctgtcttcctgaagacagagaacaggctcaagtgtgtactcaggttcctccagctcagagttatttcccgttcctcagaagtgagtttcattccctgggtgagtgaataagtttaaggaaaaccacagtaactatagacagaagagtaaaataattttttaatgcagaagaataagtctagaaacccatgtcctgtgtgattacctctctgagggtgaagctttccaaagaatgtgctgggtaaaattagagaattccatctttgagtaaagatggatatatatctttatgtgaatggataaagctatatctatagagatatataacccctatgtcctgaacttatacatatcttaaatacatatctcttaaggctaaagagatatgtaatttaatacatgtgtacccgtttgaaactatggagataaatgtttgtatacatacacatgtacatgtatatacatttacagttatttctgtttacctgaactaatttgagatcagacccaaacattttaagttattttaaattaaattttctatgtacttacactgcttgagttatcttaaaatcttagtgtatcttcttaacaagttcacattttcttatttaaatgtgttacctaccaatttacccaaacagtatagtaaaaacaaactggtaatcctttcatgctgttgttgtgcagtgggttcaaaagcaacacccctagggttctaattacatatagttgcgtttcagctaacaccagttcacccaaattgtttctccttcctccagaaaaacttggttacctatggcttagcctttcgagttaatcctgggtccagtgtggttctcctgtaccaacagccatcgtttccctctgaggaatctaaccgatgtagctgggtgagaatgagacccagagaaagatgataataatctcaataataatcaataaagaagatagcatgttctcccttctgaaataagttttccgaatattcaaagggtatttgctctcttgtcataggtgaaggtggtttctatggcccagaggcaagccactagtactccccacagcccagctttcaaggccccactggcatgctcttgaacaccaagcccgtttccccacacccaggaaagagcaatttatgtctcttgagggtagaaccagcgtaagctcatctgaatcaagttggtttttgtgtggattttaaagactaaagatttcctactttctttaaatatcctcccccccccttttttttttttactataaaaggtattttgtatatagatgtcttttaaaagtgaaaatactacagcaatacaaaatgttattgtttggtgtccttataacaagcaagggattcacagttcagacgctgccccctggaaacagggaagacacagcaagtacaagtaacatgccctgtgcttcccagagcttggctgcagaaatgtggagttaatacaacaggaacctttttgtgtgttttgtggtgtttatcctgtatattttgtgatttcttttactcctattaaacaacaaaaaaaaattagttaaagaaatttaaattgcatgttaattattaaataagtcaataaccaatatataagtacttacaatacagaggaactactgaatattagctgttataattatgttgatactctgacaaagaggtctctgggataaatcattttccaaaaatcatgcaaaactgaagattgttccacatgatcccaattagctttaaaaacatttgttgaactcattaataaccttcaatacattccccgattctgtcttattcaaaagctatatagtactcacaactgacatcagtatatttttctctgtgcctgctcttcataatatgtattctacatagtgtcagagattgtatttgtttgtttaattttttactgtttgaggctactgtcttagtgatttgatgagcccttaggataatattgacctgacaagtggagtttgggaaagcaggcctctattgctataagcaaatgctaatcattagccaagagtgggcccactcaaactggaaagagtagtcaggagagagacttccttgatgttggcaattctgacctgaatcctgaaaaaaaaaaaatcttacacactggccaaggtagagagaaaataaaaagtgtggttttgtgttctaaggaaaacacacaagaagactctgaaatagcacatgagaacattttaggagggcctgtctcaaactaacaattaacgagaaccctggtaactggtaatccgtgttttatacaagttttgtttttgtcctaaagtaatgaagaaaattttaaacagtgagttattaactaaactttcaagtattaagacttttaaagataactaggatgaagaatgagattagatgacaaaggctagtcataaagtttttaactgatgcgatagactcacaccctcacagggtgtcacaacagagataggaagtgaagcatgagagaagaacctggacgaatacccaggcttctgacctggtggctgcgagagagatacacaggaggagaagcagatggtaacagtgtgagcggagatgcctacaggacatcaagaggaaatctgaagctggagactcagcagataaaaaaaaaaaaaagtacttattaccaagcctgagttcaaccctaaaccccatgtagtagaaggagagactagactccacaagttgtcctctgacctccacaaatacatcatggagcacacacaccaagagaggagaggagggagggggaggggagagagagagagagagagagaataaccctttttattttgtttttttttttttttaatcttcattgagaaagttaagtttaagaaattagagcacttgttgctcctacagaggacccagatttggttcaacatggtggatcacaatcaagagatccaatgccttcttctgacctgtgggtaccaggcatatacatgctgcatatacatttattcacataaaataaataaatctaaattttttaaactagagatctctatgctagtaagttaaaatcctgcaagagtcatttagttgcccacatatttcttaacctcagacttgcaaatcaatactctctgcgctacctgtgttccttcagtagctgacaactgacatttaacctcacctctagtttgacagtaaagggaagctacaatttccttaaaggagaagccagcttcagataacggaaatggatacatccaaggaccaatcaatacaaacgcaagcttttacttagcagtgtccaaagaaccaacaggacagacatataaagccactatagatcagtcttttcttcaaagtttagaatcttcatacctatagcagctttaatttccccccaaaaaacagttcaaacctacattactatcaccagttaacgactataacatagattttgagtcatctttgagaaagaagattcaaacgaaaatgcatttaaaaaaaaaaactgggttaagcatcgtggtacacacctgtcatctcagcacttgggaggcaaagacaagaggaccacaatcttgaagccagctgggctacatagcatgttcaaggccagcctagactgaggcttcatctcaaagtaaaatggaaagaagttggtttcatcctcaacatgagaaattataaatgttgtagctctgtacagccctttggaagcacagaggtcaagacaagagttgtctgtatgttggagcagtaactagccaccatcaccctaactgaaactgcttcaaaggagaacaggagcagaaaccaagagaatgtgaagtaaacgagttcgtggctgctatggtggactttaaaaaaaaaactcaaggtgtgtgaggaagatcatagatgcttcccactaagaagaatcaaagacgagggaaaaacgcatgagaagcagcaagaaaagatgcccacctgaggggtggtattgggaccgactgaaacttgagccactgagccagccaaagcttttcaagtacaagtgtctagagaggatagtagggcttctttaagggtgatgctggcttcagattaaactcatgtgtaatcagggagtctgtttctcccctttgggctttcttattcccctctggcctggctcttttctcacatgttgtctgtttctcagagatgccaaagatggccactaatagtttcaaactcccaatctaccaaccccaaaaccaagcaatcctttctaacaagtgaaatcaagatctgggaatgactcctaaggggagggattgtagtcaactatatggccagctcataacctgactaccacgcccaactccatcagccccacgcagagcactgagaccaggagagaatcggcattcacctaccagaaggagggacgtgtttactaagcagccatgacagtggataaaggagagctgaagaaactgacaccagattgtcttaaaagacagaaaaggagaaattaactacagcacacaagaaagaaacatcattggaaaaataggctagagaggaagttacctcaatctttgtgttcagtttagacttgctactcttacattttaaagacacttttacatatatatatatatatatatatatttaggatttcctattattaatagtaccatgctatgctgttaacctgcaatacattcattctggtacattctacttattctcaacgaatttgaccattaaagactgctgcagctgtgaccccaaatccttgagttatgaaagagctctttatattccaggcaagtaagaaaggtctttttttttttcctcttggagcactgagtttcaaagttccttggtgagaacggactcctttcaactttgcaggggatttaatgactacacctgaggaccgttcctgtgtttacctttctcccacattgcaagccatgattcttcctcttcccactttggagcctctctatgcattctccttgtgttaacccaaaaggacacaaaggtccctcaagacagagctcccatattgtcaagtgtatggactcagctaaggtgaattgttccgcagctcaacccctgagctccagcctaacgggttttgtgttttcgactgccccactttcacgtgtgcatctcccaatagacttccttcagtgatttctctcatgcagcccctcgaggctcttgtgctggtgacagtgcaggctggctataccatgttctgagctggcccccatccctgcagattcaggaaatttattaaagtaattcaaaaaacttaaactagaatctgccaaagctgggctgtctctaagcaacttcgtcgttctaaagctcacatcttctgacaaaagccaccttcagcatgcctgagaatcatttgagggtaatgccagctaggtttgaactttaaaatttttacacatctgtcaagggcctatatttgataaacaatcttaaataataatgtgcttattggtgacatgagaacactgggtcctggcctaaggcttaatggtcctgcaagtgtcagctttagattgtaaggtaaaagtagtgtagattcctggctcctgtaaggaagtgcacagttattccctcatccttggcaaagcgtaggtttggctctactctatctgcaccaccaccaccaccgcctcccctgtcgctctgtcagcctgcaggcactcacaaaacacccagctgagcttgaccaatggctatgcagcacagccactctaaatggcccgacctacaagtagttttcaacttcggggtgacaattcatggccgaataaaagatagtctttttgaggttgagcccacaggacatacttaaagttcagctcttgagaaggaacacctaaggatggaaaagaaaaataacccactgctaagcctatttacccaaagcaatgcctcactatgaatgagggcaaaggttaaaacaatgcaatccactccgttggatctcttagccctctctcttctaccccaagacctgtggtgattgtactagcgtttcgtgatagccaaagccccagagcacaagttgctttcagtataaatgctggaaagtatctcttattacttgagggactataaaggatttaggcttccacatgtaaaatgatcgtggcctcttttcgaggctttatacgctgaccttctggggtatacctttcaccggtcagttggcccaccgaagtaattaaattaaagagagcgtcggagcccatgctctcagctgagttttggcggagttttatgaagagggcttgagtgacgaagataaagttttctgtgccagatttcatatgttgtccttgtctcaccactgcactccagccctgatgctagcctctgaagggacaatgtttctagtaccctgatgccattgttcctccagcttctgatgacagtcctttcttcctggaactctgcagtagtctcacatttgctttctaggtcaagacagaccccctattgtctgtaaggagatctcagggctggcttgcagcagcagctagtgtttctgctttccattttacttctgctctgctctgctctgctctgctctgctctgctctgctctgctctgctctgctctgctctgctctgccctgtgtggaaaccatgacagcctcttccatacacctctgcttctaaagcttcgtaagctctctaatgcctgtgcggctgtacctatggattaaatggcaggcaagacgtctcaatggtattttattcgttctattccaggtaaacacatttaaccagattgcactgctattgaagttaaacagaaaatccccccagatagaaagactgcggcttggtgcagtagttggttctgacagcctcgtgtatgcagtcactgttgtcagtattacacttgccacacttgcagcttacggcgacagggaaggagaaataaggagtaacatggtgcgggcatcctggtatttccaccgttctgtagatgaagtctctgtatgtacagacatcctgagagagtgcatatttgggaagaaacagtttgccattgatatcctgtggaaagaaaagagatcttaacatgataaactccacacaactttagatagtgtaatagaaagaccacaacttactgatatccctttgtatcagtgatgatcaataaaggactcctgagctctgttacccacacatctacaattaacccatcagatacaaaaaaaaaaaaaaaaaaaaaaaaaaaaaaccaaaaaaaacacaaaaaaacaaaagccactttgttctcatctgcctttgatgaggacaaactcttcagagtagactgttacaaatgcacctgtactttcctttctgagtagagtcacaccattataattctgaaaacagtgtttggcttcccaaagaggacattatgatttatccccacttcctttctaaatattaacagacaactttaggcctatataatttacagctaaaagaaatgcattgaacaacatacccgtgtcatacaatacccagcacagatggtggtgttgatggtcaggcagtaggcacactctctcctatccacgtacattgtatactcagtgggaatacaaaaggatgctgcttgcccacaagcaagagcaaaaagcacggagaggaggacggcagcactcatgctgaatcagagagaaacatcaaagagctcagtacagtgtcctctccacgctcagaggcatgtctgtgcatatgtaaacacacagccaataacaagaacaggtaaaatatactgactggttacttatccctgggccctgcgtaaggtgcttttgcatatccagtcctctcaaacctcctcatatacgatcagatgcagctacgaccgtgtacacccataatacaggagctcacatcttagaagtctgcctacacatgccattgggctcccctgggaagtgacaggcgaatctgcaacatcactcagaaaactgacagctttctgctaactaagtgtgaaataattcatccaacagagctataataaaaggacttgtctttataagaagtaaattaattagtattctttaggaaggactttcccagaaatcaaagttcctaaaaatgttggttcaatcaataactcagttggttcatataattaaagagggaaagaaaccaaaaaaatcataagcaaactttgctaccacccagcaaatatgattttctctataactctacctgttgattgtcaaggaggctgaaaacttaagttaaaattgtgactggtgtgaactaataacacgagctacacggtcttttctgaatccttaggatattctgttagagtttttaaattttcacattgaaacaaaagatcattttatacagaagttgtatggcattcattatttaaaaacatagagagagctgggaaaattagtgtgacacatttagagtaatccaggcaagaattcagctccttcgtgggttgttcgattcattagcagcgggctgtatgggaggcagcagagggcccgctgagcagtcccggcagctcagagagcctgtctgatacagaagctgttccgtatcagttaagcattgtaatgatctggggatgttatgacttattttggtgatagagggtaatcaaatttcagacttttagatgtaggctgatcaccattaagatgaaggagacttttgactcccttttactaatattgttcaactagctaggtatgtttggattgtttttcttctcaactatcattgttagtaaatatataaatgtataacatatatatatatatatatatatatccaccactgaagcaatattgatatctataagcatatggctgtttgtttattttattaaatgatcactattcgctggctggcaagaaggctcagaagtaaaagcacttgcagctctgcctgatagcctgagttcaattcctggacatacgtgacagacggagagaacagactcctccctggaagtcgtcctctgacctcttcatgcatgctacagtgctctccccaaataaatgggggaaaaaagcattttatttaattatcaaagaagtatcaaggttcaatctgccggttgtgtcagcaacagttttaagctgcgtgctttaaattctctacttactgaagccttgtgcagtctgtctcaggtaaccagaattttgtttccaataaatatataaacaaaaattatttacataagttactaaggatgaattctaaatgtctacttctatagctatttcaaccaatctcctattcctagcaccagaagtgccgaaattggatacacatgtatgtactgagcctctggagtaagcactagacattgtattgatatagtccttccagttcaggaggagcctgataagcacagatgtaaaacttcaggttgttctaagttctctgaaagttcaagccatgactctgataccccccagctagcaaagatttccttacatttgttacgtcatagacaaggaagtgaagtaaccgtataggaaaatgtatttgatagaaaactctgttaagaaggcattacatttgtaagcatcccttgcagtattttttaaacgtttgcattagaagggaaagcctaagaattcctggttatcttgttttatgctcccacaggggctggaaccgagactcacacacacagagccccagattcagctctacaactaggacacactttccctgctgaaatcataggaattcctttctcagggaatctgattttggtcaagtgtttcataaaatacaagctccctctatagcattcagttggttctgttactttaatgatgcaagtctagaggattctctgaagaatcttgaaaatagcaaccaggtaagtgcgcgagaacactggcccttgctgctcatttactcccccgttggcttcacagatgtccactggttttcaccacagaaaacaacttctagatccacaattctatgtgaaatagcatatgtggtacctatagtcagaatattggctcggaacataaggaacagaaatctcccatgggaaatgggtaaacgcatgtaatcttatttacccacctgcaggataaaaacagatgaacatatctgaccctttgaaaccttgtaagactgggctccaagaatggctcaggcctaagatcaagtgctgctcttacaaggatctgagtgcagttcccaacacccacgtcaggcagctcacagtcccgtgtgtctccagctccaggggttggaggtggatgcttctggcctacacaggcaccctcagacacaacacaacaacacacacacatgcatacccatttttaaagtaataaaatctcctttaaattttttaatgatagaaattgtatggtaatttttctcattgttgtcctagtcaagagtgacactgttggaagacttccttttataattacagaagtttaagctaacaaacgcaaagcattaaagccgacttgatcgccagccacggttcttctagaacgctgcgaagacacaggatatgaatggttccttttt

SEQ ID NO: 785 - DNA, 3024 bp, Mus musculus
ccggcgcccgccgctcccggggctcggcgcgggcctggggaatcgggagcccgccgccggggtcgcagcatggggcgttttcgcgggggcctgcggtgcatcaagtatctgctgctcggcttcaacctgctgttctggctagccggatcagccgttattgcatttggactatggtttcgatttggaggtaccatgaaggatttatcatcagaggacaagtccccagagtatttctatgtggggctgtatgtgctggttggtgctggggccctgatgatgactgtgggtttcttcgggtgctgtggagccatgcgtgagtcacagtgtgtgctcggatcattttttacctgtctgttggtgatatttgctgctgaagtaaccactggagtatttgcatttataggcaaggatgtagctatacgacatgtacagagcatgtatgaggaggcctacagcgactaccttaaagacagggcaagaggaaatggaactctcattaccttccactcagcatttcagtgctgtggaaaagaaagctctgagcaagtccagcccacgtgtccaaaggagctcccaggccacaagaattgcatcgacaaaattgaaaccgtaatcagtgctaaactgcagctcattggaattgttggtattgggattgcgggtctcacgatctttggcatgatattcagcatggtgctttgctgtgcaatacggaactcacgcgatgtgatctgatgatacttcatcaggaaaattgcaatctagagttgtcgtgctaattatcacaagagctctctcggctcgtttttaatattcaggatattagaagctaaaataattttctgtcaactgtatatttgcacatgtatgtaagtctgactcattactgatttgccccttgagtgaatgtctgtttctggtatatgcattgcacatactgatatctgtttcctgggaaaccctagttcttgtatgcaagaataacctatttaagtaccagaaaaaaagcaatgagagatttttaaaactcggctattcaggaaatgtaataatgggtccatttctcagattttagccatgaaaattagatacataaagagaatgcaggatttctagttaatggaagcaataagatagaagaattgaagggccatagattgactgtgtctgagttgagtgtaaagatttcttgaaatatatatatatatatacatatattctccccagaatccagtaaaccacagttttagaactaaacacatctgtaaaagtaaatatagcatggaaaaatctaattcaaaaaagtcatgttttcttagcatttaaaaacagaaagcctctctctggaaagagaagtcacgcagacagacaagcatgtgccccagaaaagtgagtgctttaaagactaaaactaacaactttgaagggggagaaacactgctataggatgacatgcaaacgttgttttctccctcttctctgccaactctgctttgaactagtgaaggcctcgccttcccacaaggcctttccttcaccctccttactgtttttttcagatgtggtgacagaggaaagcaggcactgtgcagcgtgacagtgggggactctggctggcactgtctgtacctctggaatacctcatgacttgagtttacatactttcctaatatttttccatttttcttatttatctgtgcagagaattctttatagattaagaacatagttttattctttaaaataaataaatcgccccataactcagatattatgttatgagtaccctgtctaaaccaatataaacaccttcttcaatatgtatgcatacaacaaaggcaagttaatggatcaaaagtactttcgtgcatacagctgcagcacaactatattctttctcagcgaacccctgtggggatgaatagatgctcaggttctttgggagcctgagtgattgattttaagtggggaaacccaggcactgctcggccttttggcagcaagtgggaaaccccacagcagggtcgaaattgatgtatttgtcataatggaacagcgtataaaggagtcttaggattatattgaccacataaaagtgaaggcatgaggaattctggaaaccgtcaggctagcttctatgtccgctaagaacctaagactttggtatgtgctagaacaaagtgccatgcttcaggaaacttttaccaagtgttttgctgaggacacacaactcctgggatgtctcacccacagagcgccacctctctctttttcagatattcttgctactgctactagctttggagaaaaaaactgagggagttaaaagtataactgtgtatgactactttacctatgtatgcaaaagtatttaaaaaaaatcactctgtgatgtttataccccagtggttgacaaatgccagctttttaagcaaacaaagagtgatcagtccttcttatagctttagtttatctgtcttcctgaagacagagaacaggctcaagtgtgtactcaggttcctccagctcagagttatttcccgttcctcagaagtgagtttcattccctgggtgagtgaataagtttaaggaaaaccacagtaactatagacagaagagtaaaataattttttaatgcagaagaataagtctagaaacccatgtcctgtgtgattacctctctgagggtgaagctttccaaagaatgtgctgggtaaaattagagaattccatctttgagtaaagatggatatatatctttatgtgaatggataaagctatatctatagagatatataacccctatgtcctgaacttatacatatcttaaatacatatctcttaaggctaaagagatatgtaatttaatacatgtgtacccgtttgaaactatggagataaatgtttgtatacatacacatgtacatgtatatacatttacagttatttctgtttacctgaactaatttgagatcagacccaaacattttaagttattttaaattaaattttctatgtacttac

SEQ ID NO: 786 - protein, 217 aa, Mus musculus
MGRFRGGLRCIKYLLLGFNLLFWLAGSAVIAFGLWFRFGGTMKDLSSEDKSPEYFYVGVLVGAGALMMTVGFFGCCGAMRESQCVLGSFFTCLLVIFAAEVTTGVFAFIGKDVAIRHVQSMYEEAYSDYLKDRRNGTLITFHSAFQCCGKESSEQVQPTCPKELPGHKNCIDKIETVISAKLQLIGIVGIGIAGLTIFGMIFSMVLCCAIRNSRDVI

SEQ ID NO: 787 - DNA, 61510 bp, Homo sapiens
gtttagaaactctgagcccacagactattttccaacaacagctgcatagcaacagggttcctatgctgtaaacccagcagtcaaaaactgctcgtgtttgcttatcaaaaccaaagttacgatagcaggcacaccgggcttccttttctagcagtagggcagatttgatatcctgaactaccttctcgactgaaactaagaccctggataaaatatgtaagaatgtaaaaataaaaccacatcgttgagctagcacaaaaggaagagaatctacaaaggccaaaatgaagtgaaagcaagaactcgaagtaagcaggcaccaaagccaccttttgccctgggtttcggtttcgacagctgcaaccgcttggggtttgtgaagtaaagcctaaaatgccattaatatagacagtgtattaggagacctcacccaaacctggtacctcctcccaaaggatacaccctcaagggaagagtagacaagaaataaacccatcatgcaaaagacgacaaagaaatgtatacgttttggacttggtgttggagtggggaaaatctcccctgagaccttgtcaccacaagccagccttcaaatggatttgttgtctgaattaacactatggtactgccttgagatgatttgcagaaggcaaagaaaatcctctctggaggaataaaatctcaactaaggactcaaagaattcccacaaatttccaaggaaagtaagcagtttacagctttaaaaaaatcacataatacacaaggaacaagacactaaaatcaatacgtagaaaagtccacaggcagcaaagtctgatcacagagagttcagatactagggttatgagacatataatacaaaatggtactacaactccacccttgcttattttccttgtttccaaatgcaagcccccatcagtgtctggttctcagtcccattctatttctgcagaaacactgctctcgcttttcttctccttcaacctctctctccccaggcaccttcccccaggactatgaacacatttaaatcttccccattaagaaaggaaggaagaaaaggaaaaagaaaagaagcttgcttccactcatcttgctgcaccactcacaactaagcctcttgaaagagcaattgttcagaatggtattgcctaggttgtcttccagggtttctatactttggggttttacatttaagtatttaatccatcttgagttgatttttgtatatgttgtaaggaaggggtccagttttaatcttctgcatatggctagccagttctcccagcaccatttattgaatagggagtcttttccctattgcttgtttttgtcaggtttgtcaaagatcagatagttgcaggtgtgcagcctctattctctattctgttccatttgtctatgtgtctactgttgtaccaatactgtgctgttttggttactgtagccctatagtatagttggaagtccggtaatgtgatgcctccagcttagttatttttggttagggctgtctagactatttgggctcttttttggttccatatgaattttaaaataattttcatagtcctgtggagaatgtcaatggtagtttaataggaatagcattgaatctataaattgttttgggcagtatggccattttaacaatgttgactcttcccgtccatgaacatggaaagttttctatttgtttgtgtcatctctgctttctttgagcagtgttttatagttctccttgtagagctctttcacctcctttgttagctgtattcctaggtattttattttttgtgtgtggcaattgtgaacaggattgcatttctgatttggctctcggcttgactgttgtcagtttatagaaaagttagtgatttttgcccgggtgtggtggcttatgcctgtagtctcagcactttgggaagccaaggcgggtggatcatgaggtcaggagtttgagagcagcctgaccaacatggtgaaaccccatctctactaaaaatacaaaaaaaaaaaattagccatgcgtggtggcgcgtgcctgtaatcccagctgcttgggagcctgagggaggagaattgcttgaatctgggaggtggagtttgcagtgagccgaggtcgtgccattgcactccagcctgggtgacagagcaagactccatctaaaaaataataataataaagaaaagaaaagttagtgatttctgcatattgattttgtatcctgacacttggctgaagttgtttatcagcttaaggagcttttgggctgagacaatgggattttgtatatataggataatgttgtctgcaaacaggaatagtttgacttcctctgttcctatctagatgccctttatttttttcctcttgcctgattgctctggccaggccttccaatattatgttgaatagaagtggtgagagaaggcatccttgtcttgtgccggttttcaacaggaatgcttccagctttttcccattcagtatgattttggctgtgggtttgtcatggatggctcttattatttggaggtatgttccttcaatacccagtttcaatacctacagaatgggagaaaatgtttgcaaactatgtgtctgacaaaggtctcatatccagcatctataaagaagttaaacaaatttacaagaaaaaaacaaacaaccccattaaaaagtgagtaaaggacacgaacagacagttttcaaaagaagacatacatgcagccgacaagcatatgaaaaaatacttaacatcactgatcatgagagaagtgcaaatcaaaaccacaatgacataccatctcacaccagtcagaatggttattattaagaagtcaaaaaataacacatgctggcaaggttgcagagaaaaaagaacatttatatactgtcggtgggagtgtaaattagttcaaccatcatggaaggcaatgtggtgattcttcaaagaactaaaaacaggaatatcatttgacccagcaatctcactactgggtatatcccgagggaatataaatcattctattataaagacacaagcaagcgtatgttcattgtagcactcttcacaatagcaaagacatacaatcaacctaaatgtccatcaatggtggactggataaagaaaatgtggtacatacacaccatggaatactatgcagccataaaaagaacaagattatgtcccttgcagggacatggatggagctggagggcattatccttagcaaactaatgcaggaagaggaaaccaaataccacatgttctcaattataagctaaatgatgagaacacatggacacacaggggagaacaacacactctggggcctataggaaggtggaaggtgggaggagggagaggatcaggaaaaataactaatggatactgggcttaatacctgggtgacaaaacaatctgtacaaataaacccaaggcacaagtttacctgtatcacaaatctgcacgtgtacccatgaacttaaaataaaagttaaaaaaaaagcacatttctcacttaaaaaagagaacaattgttatgacttcctcaccgctcattccctcctaagttgtggcccagcttacccagtccacccctactcttctgcagtggctgttactgaggttgtcagtgtcctaaggtactaggtcaccacatgcaatgctctcttctctcacctcctgctgctgaggcattttgcactgtggacactgcctccatcgagaaactcctcactcagcttctgtgacgccacttttttctgatttttctcctatgtctctggtcatttcttaccagtctcctttaagtgtcacatctcttctgcccacatcttaaaatgttgttgctctaaagtttctgttctcaacccttttcacactcttcctgggcatatcatccattctcatggcttaagacagccatatatctctgaggcatgcatgtcctggggatacaagaactctttccagaggtgctccaacatgaacagttttaagagaatcagtttcccactcattaacttccaggtgtattccttcctagaatcaatctgcctgggaatatgcctacaatcaagatatcttccacaagctaccgctcacccactctgaattgggtatatttccccaggttgtagaaatctcttggtcaccaatttgcaaacttgctgtaggtgctgagaaagtagataactataatatgggtaataaatgcctttgtaagttagaagggttccaactctatgctttcaataaaattgaagaaagggccagatgaggtggctcacacctgtaatcccagcactttgggaggctgaggcagggggatcacttgaaaccagcctaggcaacatggtgaaaccccatttctaccaaaaaaaaaatacaaaaattagccaggtgtggtggtacatggctcccagctacttgggaggctgaggtgggaggatcacttaagcctgggaggcagagaggttgcagtgagttttgtcatgccactgcactccagcctgggtaacagagtgagactctttctcaaaaaaaaaaaaaaaattataataaaaaaaaaattgaagaaaggccaaatggaattttcagctgatttaatcattaaaaatagtttaatagcaagagtgggagcaagggcgggaggtgccatgttcttttaaacaaccagatctcacagtgaactcagagcaagaactcactcattatagggagaatgccatccagccatttatgagggatccactcccatgatccatacctcccactaggtcccccctccaacactgggaattaccatatcagcatgtatcagtgtgtgaattggggcacataattcagagggggtttaaagaattgattgtcattgctataaaaacatcttccatctttatctacttatttgtctaaacagagtttttcaacattaatatcaaaacaatgaaaaatattaagggaatttatggtcagctttgtggttctagcaataatattcgttcatggatatatgaactagtagaaaaaaaaataccaaccccatcaatatcattaagagatgcatttccagcaatattttacctttaagtttagtgactgtttatttaaaactatattttaaatttagtatacaattttaaccacttggataccaaaaataattttaacagtaacttaatctagaagaagtttgtccaacccgtggcggatggttttgaatgctgcccaacaaaaatgcataaactttcttaaaacattatgagtattttgtgattttttatctcatcagctatcattaatgctagtgtattttatgtgtgtcccaagacaattattcttctaatgtggcccaagtaagccaaaagattggacacctccgatctagaagaacttagttaacatttacagccttatggtctcaggggaaaagtttaatttcttttaataaacatagtaaattttgttcagacaagtataaaagggcattcaagaaaaatcattcaagcataaacatgcattaatttaggatgacattttgtaaaacggaaatacaagttcaaggagcaaaaggaaagattaaaattttcaccctattaaagaggagcttgctcatgtatttttaattatttatttatttatttatttttgagacatggtctcattctgccacctaggatggagtgcaatggtgcaaactcagctcacaacagcctagacctcccacgctcaagtgaccctcccacttcagcctctggagtagctgggactacagcgagcaccaccacaccctgctaatttttttcatttgttttgtagagatagagcctcactatgttgctcaggtggtctcaaactcctggactcaagtgatcctcctgccttggcctctcaaagtgctgagattacaggcgtgagccatcattcctggccttgtttatgtattttttaatcgatgataataggtagcagatcatactggcattcagtttctactggatgtattaaaatgagtaatgtggccatttgattttaaaagtcaatatttaagacacaccagaaatgacatctctgaaaatattcaaacttataataaataattttacctgtaacttaaaaatgtgtgagggtaatactatacaatgccatttatatgaaggtttaaaacaggcaagtgtaatctatagtgaaagaaaatcagaacagtgtttgcctttaggagggatgtgggcatagattgactgggaagggttatatgaaagcctgaaagcttcctggggtgacagtaatattctatatcttaataggattcggggttagaaaggcaaaagcattgtcaagaattattaaataatatacttaaaatgtgtacatttcattggggtaaattttagaaaaatagtaaatagatatttgaactctaggtaatgttatgcatgctcaagagtttaggagtgaaacatactgcctacaatttatttggaaataaataaaaaaaaatagattgagaaatggacagatgtatagataagtaatgcaaccaaagcaaaatgtttattgtagcatctagatggtgagtatatggtgctccttgcccaactatttcaaattttttgtacgtttgaaaatattcataataaaatattgggaaaaaatgcaagagaaaatatttttgtaactattttagggcatgtgtgggcaacagttttaagaccactggcttctatttatcaccatttgctgaagaatctttaccctaaacttaccatccaaacctttctccagaatccaatcatatttccacatcatctggatttcccaccatatctaaaactcagcagatccaaaaatgaatgtattgtcttccctctaccagtcaggaatatctttagctacatgtaacaacacaaagtcaaacaaaaagagggttatttttcctatataataagaaatgtggagttaggtagctgctggtattggttcagcagttccacaatgtcctagctggaaggtctgcaattgtcttgccctttcttcatagtcacaaaatgttctagcacttcaagcatcatgtctgagttcaagacaggaaaaagagaaaagggagcaatgccagtgacagtttaaaggctaacttccttattatgtcatttaatgtagccctgtactttcttatagtaatatacccttgaaaatgtatgggatgcctttcaggcacaatacatacatatatgttgatgatggcaattcctcatgttggaagtgggaccttgtgtgaggtattggatcggagtggatccttcatgaatggctggatgccatcctccctataatgagtgagttcttgctctgagttcacatgtgatatctgattgtttaaaagagtgtggaactccccacttcttttgctcccactctcgctgtgtacacactggctccctgtgaccttccaccacaactgaaagcttcctgaggcctcaccagaagcagatgtcagcactatgcttcctgtacagcctgcataactgtgagccaattaaatctcttttctttagagattacccagtctcaggtactactttgtagcaacacaagaatggactaacacacatgcgtccacacacatacacatacatgtacacaaaaacctaaacctcaattggcttcagaaatggctaactcagttatggcgtaatatcacctatgactctggttttttcaacttcctgctttgctgttttcaatgttggatctctcctcaggctggtatgaagatggatatagcaactctatgtataccatccagatccaacagcttcaagaggaagaagaccatctggcccctcagtagacaccactcccatcccattagtcaggatgcttgtcaatttgtttcctgaactaactacaagggaaatgggattaccttcgcctattcctctcaagggtcagcttcccttaagacatacaactttgtgaaagggcgactgggcaagtctatactaaagatctgaaactgttatgttggacaggcaaccaccatctgtctctaatacatgtgtgctaaaatcgtagcatgaaaaaaacaaacaatagatatatatgttacaataggggttctcttccctctatataatctctagacatattttgtcttagagatgtaaaattcaacgatatatttaaagtataatatcattgttcattcagttgatttattgaacgccttctatgtaccagacactactctttaacttagttcttttcctttatactaaaacagaggtgacagatatagaactataagtgtttgattgaagctaatgattcacttctctctgcatacctaatgacttccatctttgtctttatttcattgttggagacatgtttattactagaatcagcactttcatttttctgtctttgactcgtttttataaatgagtcgatattcaaacaaatgtccaaagacacagaggtaggcaaagatggcaacatggtagaaactgaatggttgactgataagagtgtgatacaataatactaacccttatgcagtacttaatctgtgccaggcactgttctaggcacttcacaaatactaactcatttatcttcacaactctatgaggggagtactattacctccatgttgcacgtggggacactcggggccgatgacagtttggcacattggtcagccgactgaaagctgtgatttggcctcctgccttcctgactcactccgcccccaccaggcttcactcgggctaactgcggttctcagaactcccttggaggccttgttctctccagccctgtgcttttgcgcatgctgtcttcctggactgatcttttccgcctgagctccgtcttctagaccagatcaggcccctctccttagcaatgccttttctggttaaggcagtcaggccaggcacacctgtctagcacccagcccttctctcctcaccctatttgcttacagatctgtctccaacaccagagactgtggttctgggcctggctgtctcctcattgttgagtccctggggcttgctactatgtctggcctataataggcactcaaagttttgctgaatttatgcataagctctccgaattttgctttcttgtctcccccatactgtctgacaccacatattgtagacacttagtcaatggaagtgggagtctgattttcctgccaacagcctaacttaataaaaacaaagcaaaacaaaaaccgcccccttcccctttctcccatctccacatcataattaagatcccgaaaatttgggatccttccaagccctccgatcagtggaacccggcaggacatgagaagtcagactccctccactggccggctgggttgagggcagcccacaggactcagggcgccgcctcccgcaccctctctcagttcttgcctattaaggtaagagtcccccgaggaggggggaggggccggagggagggtcccctagaagctgcttgtgtgcttgctccgcgccgcggagccgcagccctggacactcagtcaggtgccccgcgacgggtcctgccagcttcggggcaacctccgaccccacttagctcttctacccgaggtcaccttcctagatttccatagccacgagaccaagtgcttatccctcaagcatcgcccgggcctcaaaccggtctccgcacagggcgctgattaaatgggtccccagtccccggtgggcgctcccgccctgcaggtgctccgatagccggcggcggtgcgcccactggagggaaggaaggtggtccctgggtccgggagaagagcgaacgtgctccctcgggctgctcgatctccacccgctggcgcccccacccgtcgccagccacgccgcttggggtccacgcgcccctccccgccgggccccgccccgccccccggaggccccgccccggtcctccccgctccgccccctccccgccggagcctgccgctccccgcgctcgtagcgcgggcctggggactggggatcccgccgccgggccgcagcatggggcgcttccgcgggggcctgcggtgcatcaagtacctgctgcttggcttcaacctgctcttctgggtgagaccaggagccgggagggccggtcagggcagggggccgggtggcgggcgcggggccagggtccccgagctgctgactgcggcgtccgagtcgcgctcgtggggagggctgggtgctcaaacgcggaggcgaggagaaggcaaacaaagagggaggggagggatggaagggagagaacgggaagacagaaggttgatcaatgagaaatggtgagaaggggagagacaccgtgtggctctttcctggaaggaacccccacctgccttggtttttatctcccagctagtgaccccaggtgcggggacccagcctctcctcacctccggaggacttggggccctggcggtccctgttcccctccagcctcccgtgcacacacccccttttcactctgcctaccagctggaaccagggcctggccagggtgatgggagagaaacccctgccctggggctgcctggggtggtgctccattcgagtgtgtggacactgtacctggctgtgatggttttgtttaggaaattggagataggagtgaaaattgtggtgggggggcgtcgtcctttttctgggcatcagggtaagggtacccctgggtgagaggaggtggtgggttctcttctgagaaggggatggggaatggaagggcttctaaagggcagcagcagctctccacaacccccagccgcagcctctgctaaatactaattctcccagagatgatctcattcaactttgcagggtttgattgaactgacggcgttcccaggattcatggttcacagagagataggatcttgacccttgtctcctatattatcgagacagggatacagctagaccagacctacatccctggataccctgtcccagggcctgcaggactgtgagacaaggtctgaaaattgtcttttctgcacatttcctcttgggctttcttaagagaatgtcagccagtgtaactgctcagctagaccctgaggggaaacattggataaagaggtttgagagcagccagggcctgggtgctttgaaactaccaggttggaggaggtggctgtcctatccgctctgggggacgttgtcttcccatgattgcaactaattaattattgaatgatgggctcctcttttgtctgtcaatccattagcccagatgcctgggtgacttcagcaactccaagctcttcagtatccttcagcagtggaaggtgtgaaggaggtacctcctcgacatcccctgaactttaaagagacacatggcctttgtacacgtggggatttacatcaagcatactatagggagaggcgtttctgaagaccctttatgttgtattttttaggaatctggcttaatttcagaagctgttaattatagatgtcacgccacagtgacaaccttcattctcactgcttatgaattcaaagccttatgaagttttaagcctgaggaggaattcttaagctgggttcagtgcttatttagtggctgatattgtaccagcctttccagtgatagctggaaggattcattgaatgttttcaatgtgtcagggacagtgctaagcatattactttcattattacacataatcctcacaagagtcctgatatacatatactattattatccccattttttacagatgaggaaacaggctcaaattggttaagtcacctaagatcacacagctagtgagtggcagggatggtattcaaactcagcctaccttctcttttttttttttttttttttgagacggagtctcactctgtagcccaggctggagtgcagtggcccgatctccactcactgcaagctccacctcccagatgcacgccattctcctgcctcagccgcccaaatagctgggactacaagcaccctccaccacgtctggctagtttttttgtatttttagtacagacgggattttaccgtgttagccaggatggtctccatcttctgacctcatgatctgcctgcctcagcctcccaaagtgctgagattacaggcgtgagccaccgcgcctggccgcctaccttctcttaagcactgtggtacattcaattaaccagtggttctcaaaagtggttcctgggccagcagcatcagcatatcctgggaatttgtcagaaatacaaattctcaggccgggcacagtggctcatgcctgtaatcccagcactttaggaggccaaggcaggcggatcacctgaggtcaggagttcgagaccagcctggccaacatgatgaaacctcatctctactaaagtacaaaaattagccgggcatggtggtgggtgcctgtaatcccagctacttgggaggctgaagcagaagaatctcttgaacccgggaggcagaggttgcagtgagctgagatggtgccacattgcactccagcctgggcaacaagagcgaaattccatctcaaaaacaaacaaacaaacaaacaaaattctcagctcatcccagacttgctgaatcagaaactctgggggtaggatccagcaatctaatttaacaagccattcacataattctgatccatgctcaaatttgagacccattctgttaaacaatgattaaacaaataataatttataaatataaacacagttccctaagctgctcatctcattgaggaaacgagaccagtggatatggaacaacacaaaaataagacagtgtggaatcaagtgacaagtttcacactgttgaccgtaagcacagtaaggaaaggaagtaggagcagtgcagttttaagtgcttgaatgtgttaaccagtgaggttagatccgaccttctctatatgtgatctaagtaaggagtttagagaaaggatcacagtcatgatgaggagccagaaaagttctccttaagaaggagctattcgagctaaacctggaaggactggtagaatggagctgggcaaagcgagggggtgacgcaccatccaccagcagaggagcagagcaagggggagtgtgcgccaccatctgactgtcgaagccatcaggctggagtgcagagatcccaagcagggcgtgcctgcacaaacagggtgtacttgagcaagttattgttacttctaggcttgttttctcatctgtgctattggagtaacagaaatattgagaggattaagagggaatatataaagtatgtgacctcaacttcctatgagcctaggacatagtaaatgctcaaaaatattaattattatttttgttatcggcacataggaagcattcaataaatgttagctctctttctcctgattcctttcttggtggggaatagtatataagtttgccaagtgacttgccatttgtcttcatttgaggataactacaccttatcttgtcaatttgtacttgtggattttccccactagaacttaaaacactctgagagcaggaattttgttttttctgttttgctcatagctgtatccccagtgctagaatagtgcctagcatatagaaggcatgcagtaggacatgaaggaccttcctctcccccagtttcatggggggtgggggtggaggcagcaactagagcgaagaggcaactgaaacaggcacctcatgacttaagggaaagtgtgggataaagtatctagatatctgccttcactgtaactgagggaacctgattccagaaaagccccactcaagtttctaaagttgtttttttgtggttggagggcttcgtgggaagtttgggaaaggggtgggggatagttttcctagaaggccagactttagctgtgactgaagtataaatttacacacacccttagaagctcatgtgcctgcccctcggagttacggggttccttgggtgacagcacttccttccaatcagaacctcgccagaagtaagcatagaggtgggacaggttctgtttggtgatctgcgatttaacagatcaatttgcagcctcctctggcagcttgctttaagtttccctaggctgtgctcctggtttcataaacatacaaccaggccctgccagagccagcacagtattccctggcccagggccgctgactgtactcaccactgaatttttaaaaacaaaataaagcctagccattaaccccactacattaatttctcttatcgtggttgatgtcaaatgtgaaacccctcccaacatctgtcatgtctaaattcagacctgcgatcagatagcacagcatattcctgtgcctttcattgaaatcacctttttttttcctacgttgcatagcaatataaataaaacactacacccccaccaagccgcatatgttggcttaaaggaaaacctgggcgctgtttattccttggtttattgttgtatggtcagtgttttcctatcattgtgctgcactagctgctcagcgttactgacccacaggaagcagagctgttcattgttgaaaagcagattccatatatggcaagtctgaagttgccctcctttccttctcaccattattaatacagctttgggttttcacttggggatgcctaacaggtacatttaagaaagacagtgtcttgcaggcttgggagtcaaagaagtttgactcacatgaatctcatagaggtcaccttccactctttcccaaacttatttcaaacagtaacttcagagcaatcacctgtcagagacattggtttaggaaaaaatacctaaagaaagtattctttggagaccagcccataaggcagataggaatgttctcagcctcgctggaggagaatcttcatttctgatttttgtcaaggtggaaagagagtaccaggggccagtgtcccctagtgtggacctagaattgctaggaggaacagatagcctacaagaggggacagtctgaagaagccacagctatggtgccagggttccggtagacctcggacagacctatgcagcgtggcagttcaaatccaggaatccaaaacctgggcagtggatactgacatcatactgcctgactctattcctgcctccactctttactacctaggggactttgggcaagttgtttaacctctttgagcctccattttctcatctgtataatggacataataaactactaatatctgtgaactttgtgcacataaaatgagttaatatatgtaaggttataagtatggttcatgcatacagtaaataataacatatcagtaatagttgtttttaaatactagaagtacaaatgggaaagtagaatctagaatccaagaggttcataaagtcacaacaaagcaggcaggtgttttacatccagctaagcaagcaaggtagcaagaggcttggagtttatcaagggcatggagtcaaaaggagagatcacttcctccaccgttccctgccaagtgctgggaattcaaagatgattaagacacagcccttgatcttgaggcactcatgcctttatttagcctccattttgcctttgattagaatttattccctgtttagtctttgctccttgagggcagggactgtgtccttttggcatcccctttctcccaatccctcagtacctaatagagttaagcatggctccagctaaggtagttgtgtgcactgaccctggagcaggatctgtttatttcctttcccacttctgtgctactaagtggaggccaaggaaaagcaatgggaaaacctttggtgatcagtgcctctcaaactttaacgtgcgtacagatcacatagggagcttattcagctctattcggattcagtgggtctgcatttctaacaagctcccaggtgatgctcgtgttgctggtctgggaacatgctttgagaacccctgttttagatgtggcctgaagaggtcagagattcagcagtggcacttgtttctgactgaagcagggtgtgccctgcttcttggcttactcacttggcttgtttttggcagttcttttaatttcagttaccactttacctttattaagtctcttttttacgctaatacttgatgctttctggaattaccgggaggccacctgtccattgttcattgcatttcaccttgttgttctagaacatcagccatgaagtgtctttgggtctccaaccatgtgtgacaaaagagaacgtaacctctatcccccaaccttgacagttaatatcgcgaagctgctcccttaaaacaagtgatgctatactgagcactgaaacaaatcatgtcatggttgctaaggaattaaagagagaatgctgccagcaagatggaaataccagatgggctgggagcacatcttacagatgaattaactcgggttaccttggcctgcctttttcatcctctttgaatttgattgggaacaaaaataacaatgcttcagtttacgaagtgctttcatatgcgttatcccacctgatcatgaatcacaacaatctcacgaaatagtgtaattattcccattttacagttgtgaaagctgaaagtcaggcacagtaggtggtatgtcccaggtcttctgactttaaaccccatgcttttttcattgttttaatttattggaacgtgtagaatataaggtataagaaatgctgctaacttggaaaatctgaagcctgtgatcagggagattatattcagtgtcagatttagtcttgatgcattccagaaacaggtacaaagagatgcctaaaaatactaaggcatatgggagaagaagcaggaaggagagaggttgggaacactgctgatcagtttcaggcagaggaaaagtaacatggaaattgagaaagggtatatatcaagagacagtttaaaaagttaatttcaggagcaaaaacttgaagaatagtaagcactatataaatgtacactatgtgccagctgctttcctaagcatttattaactaatttaatcctcacaacaaccctatgaaatagtagcagttatcatccccagtttacatatgagaaaacagaggtctgaagcattgaagagacttgagagctggccagtggcagagctgtgtctctatgtgtgtccccagagtctgtactcataaccactccaagtctacagactatcggagaggaaggttgaagctctgacaaacttgtgaattctagacctgcactgtccaatgcggcgactatgctactgatcacatgtagctatttaaattaattaaaactaaataaaatgtaaccttcattttctcagtcccactagctacatttcagagctccatagccataggtgcctagtggccacaacgctggacagcagagatataggacatttacatcattggagaaaggtcttcttgacagccctagcctaaatatagttattctttcactcataaatatatctattcatatttttctcttatggggtcttaaaaacattaaagagaggagacatagtttccacaaaaggctactgactttctagtatagaagatttagaaaaccgaaaggaattccagctgtcatggaaagagggagtgtggatctaaaataaaaattagtagaggacggctgcagcaaaccacattattggaaccatgggagcgatgtttcctatcttgaagattaagcttttggtttgaaggtaacattagcaagtctaccaacataatagcacaaagtgtgaggcacttactgttctcagtgtgtaacatgaactcatttagtctctttaggaggcactattattaccttcactttgcagatgaggaagctggggttagagaggttaagtggcttgcccaagattataggaccagtaagtgccagagtctgattcaaacccaaatgcgtagaacccccatttttatccactacaactcctttacacctacgtaccgtatgcacgcatgtgtttattaccctaagggcatcattatatattctgaacacccagaagaggtgaatttctagaagaacagttggcagatattccaggatgtgtaccaagctctgtcctccacatcgtaatggtgattgggaaagagtcagcttattaacaggggtggcagagcaaggctgagcagggccaggggtgcattggaagttgctgtcactcatccaggaagccgactttgtctccctgctcccgccagagtctatctagccttctgtgaatggaccagtgctgcaccttcctgacctcaaacaggtcctggtaaaatggcttttaagaaaaatctctatagagcaccaagctagactttcacaatttctgctagattccacccatgctaacttcttagtaaacaaattgttttggcttttctaatctagccttagttccatttgaaacatttttttaaccactgtcattctgtaacaactaaaactggatgaagatcattatttattgatcaataattaagaattgtttatctgctccaaagtagttctcccaaccactataaataaatattgtttaatgtgttgtctttgcttatgtaaagctctatatagatgagatgtcacagtagtcattgtggcctccaagataagtgattatatatgcagagggcaggcctaggatgagagccagctggatgttccaaggaggaggtccgctgaacctagaaaagaccatttttttcctctccgggcttatccccttgatgaggtaagtaaggcagacattgagttcagttcacttctgtgacttggtagaccagattttagttctgtacatatttgatcttcatttgagaaagccatctgctccctggaatccttagccagtagtctatgacatttcattttgctgtatagtataaagaagactacataggctgggcatggtggctcacacctgtaatcccagcactttgggaggctgaggcaagaggatcacttgtgcccgggagttcaagaccagtctggacaacaaagtaaggccccatctctaccaaaaaatagaaaaaaatagctggatgtggttgcacatgcttgtagtgggaggaggaggtgggaggatggattgagcctgggaggtcaagactgcagtgagctgtgatcaggccactgcactccagcctgggcaacagagtaagaccctatctcaaaaaaataaaaagcaagaaaactacacagccatcgtctttctcctaattcttgatgttccctaatctccttctccttctccctgtattgttaagagaaaagacattatgtataatcaccaaataaacaacacattttccactgtctatatgtaaattatctgctctatcatttgcagcaagcttttcatcccaagttagtttccttcccctgagcttatatttctccagcacttctaaactgcccccagcaatgttggttgacccatgcaagttaactttataacaatttaaacaaactgaaggtgcatctggcacaaatgtatagcccagtgttctttgcagagatgaatggaacactcctgattttattgtggcctgaattgcaccacccttccatcactgcagagaattaagcattggtcaattataaaatatactcttacctgaaggaagtttttcttactgtgagctttttcttaggaaatggcatgaggaaaataatggggagatcagaaacactggtacctaaaggagctgccatgcatttccagactaacacagccttctcatcgccacaggctgccacagtcctgcctctcagttcccactcacctggtcctgatgaaggccaaggtagcgaggtccttcggagaccatttgacatagatgtcatatggcattcaattcttgtattttttctgataaaacccttgattttgaagaaatgccatctgaatccttgacttgcttttactgcataacagaataaaaatcttgggagctggttttcctctttgagaaaattcagatcatcttccagagcaaatgtgcttctgacttttgcctgctaagagggtgagactccattacccttaaggtatcataatggggtttacaatcagatcaataatcataagtgctcattatgtgattccaatggggatgagaattgccaccaagagcaagtattagcttaaaagcatttaatgaaaattctagggttgaagcatcatttccaattttgtgacttcatcccaaagaagagaattgcaaatgagttggtattcaccctggagaagcaagaatacagaattgattttgttcattctttcatttgagtgcagcatgcgtgtgtgtgtgtgtgtgtgtgtgtgtgtgtgtggcgctataattgtattgtgttcatatgcccctgccagtggaaggcatgtatacattgtgtagatttacattgtgtagatttattctttgtatccgtggatggtacacaacacacattcctgcaggcttaggaaaacacagaactgatactatgtgctctacttttgttttctgtttctgaggcatgtgttttgctgagcatattcaacagcgtgttcacacagtgccttcgaaggtatctgcagtgtttcccaggtgcagatgagtttgaaaatagcactttgtgaagtattcccttggagacttgtgaaggaggttgttcgcaattgctcctgtcagcctgtcttaatcagctcaagctgacattttaaaaatataataccacagagtggggtggctgaagcagaaatttatttttcacagttctggagactagaagtcagaggtcaggtgctggaggttggaagtcaggttggattctggtgagggctccctggtgagggcttgtggacagctaccttcttgccatgtcttcatatggtggagagacagaaagcaagctctctggtgtctcttcttataagggcactagtccctcatgatggccccaccctcatgacctcatttaaacctagttacctcccaaagccccaaccccacatatcctcacactgggaattaggcctcaacctgtgaattttgcaggttggagggatacaattcagtctatagcatctttgtgaaggtcctccattcactcatttagcaaatgtctattgggagcccactctgcagggcagaggggattatgtttgggaaacagcaatatagaccctgtccctgccctcacagagcttaggccttaatttacaaaatatgggcatatttaagtagaaaacattatgtgagatataaaagaaggtacctatctaggtcatggtaggcttccctgaggaattaatgttagagctgtgaatgggtgtcagctagggggaggcggaggagggaacagcaagaacagagacctccacaggggcaggaaggatctgaaactgtagctggagcatctgagggccaggacctgtggttcccacttaggtatcagtgcacatgctgtctagaacttccctaaatgatgctttttacccccaaagggggcttttttgctggacttagtcactagaaagtggatagcaggtatttgctcttggtgatctggttggctaacctccaggaaaaggaggacagctgggcagactggggaggccagaatgaggaatgatctctgcattcttgcatctcagcaccaccccactccaaccgcagcgcctgcctagggaccatgtttgcaatttgtgaaacctgtctttttttaaaatgaaaaaatatgtcctcaagataggacatctcatcagcaatcccaggaaatggaagtaagtacagtaaaataaaattgaaatctattagcaagctctgcttcatgcacgatgacttttttttggcagatagccattattaaagaaaactttttgtccatccactttgctttaaatgctttctaatcaagttttcagtccttcttctgtttcttgagttttagaacacacattgttttcactaaagacatatgcttacaatttgcaatttcgtgtcctccaaactctctggaatatggttagctactgaaagaacttgcccaagacaatacgtactataaccatatgtgatgatcccctatttaatgacttggaattattgtcactatctattcctttccctgcattcttatcttcttttttttttttaagtatttttcttgtcctctttttaacagttggcacactcttgcccttaaatactattttatcacattctctgagtacctcacatacaaccggtcctcagaaaaggaatgatgaggctgggcacggtggctcatacttgtaatcctagtactttgagaggctgaggtgggcagatcacttgagtccaggagttcgagactagcttaggcaacatggtaaaaccccatctctacaaaaaatacaaaaattagctagtgtgatggtgtgtgcctgtattcccagctacttggagggctgaggtggtggatcgctagagcccgggaagttgaggctgcagtgagctgtgatggcaccactgtactccagcctgggtgacagagtgagaccttgtcaaaaaaaaaaaaagggagggaggactcaaaaaatggtgctttctggcaatttctcatgtgcattctggtgggctgcctctggattgacttcccacctgcagggttggattccctcctgggccacccagtggggattagcgtctccttgagccccagaagaaggactggactttcctcatctctgaaaccttggcttctgactcatagtagttgctcaataagtgtattttaaaggattaacatcaaagtccaacttttgcttctgtatgaaaaagtccatttccagaaaaacaacaatgtttctagttgtaattgttccaaaggcacagggattggcgctggtcctggaagcagggcagccctcagcaaagttcttcaatgagtacagtgagttcgtagttctcacagctctccacgtccactcccctggtgtcctgtccctggtcctcagccattcaagcctttccctttggctccctgctatgtctgacctccaggtaacattcatgctcctgatggtttccatcaaagtgtgggcttctgtccctcctcccctcaggcagaccttgctatgggctttccaagatggtagcaaacaaagtagaagccgagtcatggtctgtcccacaccctctcaagccccaacctccgacctccccaagactctccttaaaaaacacagcatcgaggtaaggaaatgaacctctgtactaccatctctgcctggaattcgcctctgctgccagtcgttccttgcccagtgacttctcactcattcttcaagatgtaaattaaaatttaatgattcctcctgcatgccagtggctacagtttgctccaatcccttggcagtgtgcatgctgttcctcttcagcacacttcctgcattatagtgcacttagtactttatgtgactatctaccacattagactatgaaccatgtctttttcatcatcgtttccctgacactgagcacagtacctggcctggactgtagtttattcttaataaacatgcaaggaagaaagacagggaagggagatgtggctgggggcagaagaaggaaaggttaaaaaaaaaatggtagcctcccatttcttatttgttttaacattggctgaggtgcaatgttatgtctgaatgcaagaggggttgagactaaagggagaagagagaatgtgggcgtgaggcagttttggcctcatcgggttaaaatttaggattagagagtttgaagacttccttcaggtctttggggagaccatttcctccagctctatggaatacagggaatgttgagaacttagtgacactgacatgctcactttgttcctgactggactggaactggtgtgaatttttttcaagcaatttctagtctgtgatcaaagcccagtgaacacagagcattccatgaatcttaaaggaatggcgagttaaaaaggaccaaagtgctgtgtggtctgtgccgatgccactttccagagcagtgatcgccctgtctcttgtcacaagcagcatcaaccctggccgggtccttacccacagcatccctgacacagccggcagcagcctgctgggaggattcccttccacacagtgatgacattcagctaagccacagtttccttgacccaggaggaaacccgtgtggttgggggttaggggcatggatgagcaagcgcagattttttcccattgcccgatggctttaaattgcaacctctcttttaattttccattatgcatcaaacacatctgtgccagaactggacaaatgtattctgtctgggaggataatcccagacagctataaattagagtttgtgtacagagattccaaaaatgtggcctcgtggtggggtgtccctgggaccagtcacctcctccacagtctgctcggtggctgctggctttggcctgatgcctctgtcaataggtcttgctttgtatttggaaactctgtctttccattgagtcgccacagagatgagggcgtgcagggttgcctgtgaggctttgctgggcagacttgtcccaggcagcctccagatgcttctaggaggaacctaggtgattgaccaagggcattgctctctttcctacacaggaacagcaaggacctcaaagctggtgtcctcccaagttaaagcatggcccaagaagactctccccactttttctggattgcacatagaaactaccgtgtaacactttaaaaatgtatttttaaagttacaagagaaatacatgcttaatgcagagaacttagaaaatatactgagaaggaaaaaagtcacctggaatcctgtccttcataaataatgttttagcaaaactcctttcaatatgtttccatgccatgccaccctttttttaaatgcagacgtctttcagaagctgattgatcccgggtcctttagctgcccctcacattatccaattagtgctttcctctaagtactggaaacttttagttactccacaagggagagtccagctggtagaattctgcccctctgactcctcctcactgaggtcgcacctcttttctgaagaagctggccacaaaggggattggccttgggagatagaaggagaagagggataaagtcctcatagaaatccagccagatcgtccagaaggctagttccgggtcctttataagctgcctggcaagacagaagtcccctgtataaaaaggactatgctgtctctggtgcgatttttccttttagacctctgcttctctgatttccatcctccatgctcctgttcccagtgtctgtgtgtgctctgctctgtttgggcaggggaagcctctaaattgttcatttagtggtagactagggcagcccaacagcaactggatgggctagcagaattaggaggctatttttatatctctgcttactttcccatggtgccctgggcccagaaggtgtccagtaaatatctgttgatggattgatacagtgaaattcgagagtggtgtttgtggagagaaaacaccgtggctagagcctgctggcacgcagcaatgacagtcctgagatggcagaaagggcttccaacttccaagctgagcctcacaaaagccttcagagtagggaaggaaaggaagccgggtgatgactctaccagccgccagcctgcctagccactgcctgtgccagccactcagcctctccatgagccacacagcacacagaccacgctttttcagaaaattattttttcctttctcactttccatggaaactcaaaatagcaaccaaaaaaaaaaaagactaggctatctccctaccagcaaaaccatccccagtcagggcagtgaccatataggatggtggagagggttacaaatgcccctaaaaccgctttctatttggggactgtgcactcacgaggtcacgaggtgtgggtgggttctgaggttgaggttgctgtattttcttcccattcagaaaagtgggtttcccccaggtcttggagttcatcgtgctcttggtgacctggcagctgagacatagtcacctctcgttgtggtgtgggtgaagagatccaacatgcccagcaagggacaaaaaggcaggggcagatgccttccagagggaatgttattggaacattgcttttgagacacctccctggctgtgctgtgtgtgccccataaccacagggcagcctggcatcatggaaaaaccctgctttcagaatcagaaaaacccagtccaatgtcacatcaggggcctgaggggcttcgtgcacatcacttcacctctctgagccttcattttctcccctataaaatgggaaggtggtctaagtgatttccaaaggggtgaccttgtcagcatcctgtgcctagagcctgctctcggatctgtgcatgctctttccccttccactgtaaacacagtgtcgtttgccttccagctggctggatcggccgtcattgcttttggactatggtttcggttcggaggtgccataaaggagttatcatcagaggacaagtccccagagtatttctatgtgggtgagtgactccagcttcctaagctccagctcagagtagatggggctgtgcaaagacttagagcagaagctgcacttgaactttggtgggagggggagggcagagaggcagggaaagacgctgaaaggagccacctctgagcccctgtgcactggtgtagccctccgagttgtctgctggagacaggtagagaggctgtggtgaccccttccccttgccctcacacggtctgttcctccgctctccaaaatcaagggagtctggggctggtaagagcagcctgttgtgctttgtttcaaggaaagaagtctcaaggaaatgcagctaaaatttatttcaaagaatgagaaaactccctattgcccctggagtaaagtgggtacaccacaagtgtgtcattcactagtctatatggggtgacacgggacccctgtaggattttattttgtgatcttatattttaaattgtctaggaaaaaacataactcaaaatacaggtttgaaggtgctaatctcagtctctccatgactagggactgcagagtggaggggaggagagagaagaatgagggagaggagggatggagggagaggagatgagagggactcccctgggaagaggttccagcaggaaggggcaatagctctgaccccacctctgtaggaaggggtgaggagtgtggggtggggtgcagcctccacccgcaaggcagtgttcttagtaggggctgagcattgttgccctgggattagttgacctaattctagcatttcctgtgacctttcctcattccccagctaagtggactaagactctagatttcaaaaagcccaagacaattgtcattaaaggtggcacccccatatactggctgttttaggatctgcaccagccatagagtaagcttcagttgctgtggtgacctctatggcagggaggaagagcatcctgcacaggtcatttgctctaaatcacaagaagagtagagtctcttccatgagagagagagcgcaggccccactcagagcagggacatcctcccgaagggccagcctgcagctgtgctacctcttattacaaacactcttcccacacagcatcctcctgcgaggaaaagagctgtgtcagttaggatacttttagaggagagtagcagaaaacctactaaagatggataacaataaggacattccacatttcaggaaatcttagatgtggctctttgtaaaacactcaattattttaggttccattaagaaaggaaaaaatgctaccagtttagcttagctatgacataccataaaagatgcattctaatttcagcattgttaaaatataccaaaaaataaatcatctcaacagtgatgaaatatagtaaaagaagtctggagatggggactttccagaattcgttcagagctgaacaaagtcatcaaaggcccaggttctttccccctctctgctgtcttcagtgtccttagacatctctccttaaaagatagctgcagtggctccaggcatcgtattctcgtacagcaacatccaaaagagaacaaagcaaatttcgcttcatagggtcccttttttgaatgagtaaaacctttttcagaatctcccaacacatttccccttgcagcttattagtcaaaattgcattctgtattcatgcctaaaccaatcatggccaagaagcgaattactatgattggatctctgactaattgatattcacaccctcacaccctcccctgggcctggggaggggcctgggctccccataggacctgtgacacttggacaagattgggattttgtgacaaggaaaaagcagaggaatctgccgtagacataaaactgaaatgctcctttctacccacatggtttccaggaagtatgcacagggcaaggacatttgagacaaaaaaatataacctatcagtataacctaaatataatccattggccagcattcacagtcctgggctctgctgtcacacaaaaatgtataagaattctgtaaccgcccccatgtaacttgtaatataaatgaaaagactcatagacttcacaatttaaattacaataaaaattagtatgtgactaaatgccagctaagtggtatttgcagtgggtgcattagaggtcattctaaactggtaaggaaagaaggatttaagttaggttttaaagaccaggctgtaatcaatggagaagaggaaaaatggggactagaaaggctgaggggaaggcatgcacaaagaatggctgtggggagggattagcaagctgggaggggctgggggctctgttggggtctgaggactagggcatggtgggcagtaggatttggaatgttggggagggaaaggggacaagtatagaggcctttgaatgtcagggttaagttggtaaacagtagaagaatgatttggggccgggggtagggtatgatctgcactgtactttaaagagattattatggcagaagtagaatgaaaggggaatcccaggacagaaaaaaaaaaaaaaagcagattattgatataatcaggccggacaaattagggtataacccacaatgattgcagaaggaattaagaagaaagaaacagaaagataagaaacattattaaacatttttaagcctgcctaatcaaactcagggacagaagaaatcaaaatggcaaaagaggtagtgagaggcagagtcaagcctctcagtaataattcatgactttctgatggaaacctgagttacaggtctaagtaaggggcccccgctccatcagagggaggggccgttgcgtggcgctacagatggaatacctccccgggagcaacctcagtctgtgtttctccagaaacaaagggctgataaccatttcacagctctagatgtcagttccacataaaaacctttatgattagatacatcaaaaggttgaatagacttccatagatgaaagtgagctctccttcatgtcatatttaaccactatcgtggcaagaatcagaattgtgtgtttcattcaggagattcctgtgttgagccagaggctgaactggctctacacccacattcctgattttgtttctaatctaaaccaaacaatacacacactgcctgagatatgaggaattcttcattatgtcatatctttatggacatgtctatcaggactcttcgtattgcaaatcacagacacctactcaaattgactaaagcaacacagacctttattgacttacatacttgaaaggtcaagggttaatactggtctcagggactcagatgatgtgacctgagtccagtctggagccatctcttggccctgctttcctttggctccattcttaagcaggtttcttctccatgtgataaaacggccgtcagtggctctaggctccacttccagagtgactccagaagtagaacatgcttttttcattccaacagatgcatgtaatgccccaggcctaactctcgttggcagtattggacctcgtgcccatcctcgaacttgtcattgtggacagctgcttgtgggcatatgcctgggcttcatgcccaccgtggagctggaggtgagtcagccctctcaaaccacatgggctgagaatggaggagttccctttacctaatagagaaaaagaagtggattctgggcagggaaaacagcaggccacagcagggcctgaatcctcctgcttgctcttggtgtcacagggcatgatatgggtttacccacctttcgttcctcgtccaccccatctccctttcctaaggcagcccagagtggttggtggtaaaggcactcacgatccatgctcaaagttcagagaagtgggtcatcatagaaacttagcaccacgcagaataaggaaactacaggctgtggataaacacctggggctggcagtcagccagggcttcccagctcctcctggtggggcttggcctggaacccaggtttgctgacagccaggtccgtgcttgccctgtctcccggtgctgcctctctggatagtggcaacaagaagtccttgtgaagtcaggtaccttttttccctttcaagtatgtcttataatataaatagaaagacaatagacatgtttgtagaaattgacattttttcctcagtaaataattttccacataagatacctgctctccagcaacaaaacaagaagaaaaatacactaggatgctgtttatggatttgcacaacatacagtatgaggtgatagcactttaggaaacaaacaggcccagtgtttggaaaatctcactccactgtcacagggcaccattcactgatctgggtatttccttttcagaataggttccagataaatcagcccattaaactcttatcacccctttgttaaagagtgtcctaaacaggcatggcacattcaaatggttcttaaagaaataagcccttccagccttgactctcctctctgagaggaaccccaggaagacacacttgtctaggtccctgcttcggggtagatgactgccagactttgtaagggaaattgtcccatcttctgggggaagctttcctttctggcatccttggttctctttccttggggatggagcgagtttcccttcctgtgataaagatcagacataacctccaagccagaggtgtggtcaatcccagggcagggcaggaggatccagctgtgggaaatgaggacagggcgagaggatagtcagactgactgccacctgtgtctcttctcagggccctctgcatccaggccaaggcctggaggcccttccaaagtctctgtgtccactggttgctaagggtagaagagaggacctggcaggagtgacgctggcagaggagggcttgggttgctccgtgttgcctagaccttgtccacgctagtctctttcagggcactcttgggagaagcccccgtgtcttccaaattccagcaacctgcccatctgacttcctgttacagtccctctctggagtgggcagacaccccaggggtcttctttctagagttacagagtagggagcgagcccctcagcccttggaaaactggagagactgtgtgcttggtgcatgaagtcatgtctgtgagcagaggatattaacaggttttctccaagaaggggttgcccacacacgcaggagccactcggctctccaggatcgcagcctgactgcagctgtctctccctgtggaactcagagtctccaagcctggctctgattgtggctggatgttatgtataaggaaagcattccagtgccgaacaccaagggggtggcttggcttgttaaaaactctgactcacgctggtcatatttttttacttggttttcacttgtacctgacatccatggtagctgtataccagagaggtgttgtagcttacattgttgagacaatttctccagagcatttttataagaagttggaatagacaatcatttccatattgcagctaacgaaactgaagggtaggaagacttacctcaagccatagttggcaggcctggatttctggctcccagccctgtactttcagaggaaaaaccaggaatcatcaattctagacatctcaagtacttttctcaagggagaagaaaaataactctactgccatttataaattgcaaaatgaaccaatttctagctaagagcattgttgttcttcacagttactgctaaaacgaaagcataggggttcagggactgcactttggagtaggctcccctaggttcagttccaatttttcccctcacaagctatgcaatcttacataaattatttaatttcttggtgtctcagattcttcagctgtgaaatatgaacatatttaagcatagtatctgttctgtggtgagccctcagtaaatattggctattgttattacagatcgagcatccctaatctgaaaatccaaaatccaaaattcccccacatccaaaaccttttgagcactatcctgactctcaaaggaaatgctcattggataatttcagatttgggattttcggattaggaatgctcaaccagtgtaatgcaaacattccaaaatgtgaaaacatcctaaatctgaaacacttgcccttcccaaaaactaagttgcattcaatattctagatatttgcattattatatgcattcaggggatactgaagggacataaatgtagggacataaaaaaatttcaaataaaaaaaatggtcattagcagattatgtaaaaccatctgctgctagaaagccattaaaattgatgaccacgtccagtccctaaaaggggggaaccacatttttaaatgagtttatcccagtaggccgttaggaggttctctctcatttttatgttaactaaaatgatgtttctagcttaaaagaagactctgaaacctaagaaaagagtgatggaattgcctgggaacatgttccatatcttaccccagctagaatgactattatcaaagggagaaagaatagcaaatgctggcaaggatctggagaaaggggaagcctcgtacactattggtgggaatataaagtagtacagccactatggagaacagtatggcagttcctcaaaaaataaatatagagctatcatccagcattcccactgctgggtatatatccaaaagaaaggaaatcagtaaatcaaagagacatctgcactcccatgtttattgcagcacttttcacaatagccaacatatggagtcaacctaagtgtccatcagcagatggatggatgaagaaaatgtggtacatatacacaatggaatattactcagccataaaaagaaagaaatcctgtcatttgtagcagcatggatggaactagaggccattgtgttaagtgaaacaagccaagcacaggaagagcagatatcacatgatctcactcatgtgggaactgaataagtggatctcatggaggccgagggtagactgatggttactggaggccgcagagtgtagggggttggggagataaagagaagctgcttaatgggtacaaaaatacagttaaatagaaggaagaaattcttgtattctatagagcagtaggaaaattatatttagcaataatttttatatatttcaaagtagctaggtgagaagaattgtaacttcccaacacaaagataaatgtttgaggtgatggatatctcagtgacactgatttgatccttacacattgtatacatgcattgaaatagcatatgtacccccaaaatgtgtacaactattatgtatcagtaagatattaataaataattttaaatactttttaaatttttaaaaatgaaggtgtcccagggaaagtacttgtggtagcatgtcacagagatcactggcatcccaaaggccagctattcatgatgaaaatgtaatttcaaaatgttttctatttttcaaatcaaaggcaataggactcggaaagcatgagggctttgggaagtaggtcgtatgtttgtcacacctgctcctgtgggaaggagaaggctctacagtaaccatcttggaatttaaaatgtggctgtaaattaattattacattcagcagctattttttgagggtcagaccataagaaggataaagtatccttggaagccacaggtggccttatggcatgcggagtattagagccagatttggaactggatccggcacgcccagggaacctttcctcttgtagaatttcttctgcttttcccttcagcttcagcaagcaatgttcatttggagctgggctgagtcacgggcccacacatacaaaacagaggctggctgagaagtggcctcaaagttgaagctgctagggcagcttcaggttgtttttgccgtgagctctgggattctgatagcctaagaatgaaatattgttcaaaaaagcacactttcctgaaaagctcattatttcagaaggataaggattgttgcctgagggagcagacagtttcatttacagtggggaacaactctggcctcctcaaacctctgtgcccctgtccagtgagcctcctgcctcctcacgagcctccctctttcgcatattccagggtgtctcggggtgcgaagcaaccatcctcatgtgcttggctttggagagcacagctatgtagttgctttgtggatgtttgctgagacctgtttccagcatatatctctaagcaaagatgggtgatgacagccagcaagcctggaactgatttgattttctctgtcttatctactaatccaatgcacactgactaagaattctgccttgtgcagggcatgttctagagaggatgaataaggtttgtcaacttgaaatctataatgagagactaatatgagaacctgcaaaagcacaaaatggaaaagagcaggacacagccagatcatggtgaattcccaggtggctggagcataggatggataaagattttgggggaaactgttctgtaggctgtgacttcatgatagatctgcaaacggcatcatgtagcaattgtggcagtagcaatgagaggcaatgggcatgttctgcagcaagggggtccaccaggagacattccatgaaggaactgaatatggtgttgttgctgccgccctgcattcagctcgcttctgtggggtggtcaaatagaagtgtgggatgggaattggggctgcaggccagggcatcctgcctacagccatcttgactctcagacctccatttgtaaaacagaaataatagtccttgcttacctaaccacgttgttttgagaagccaataagatgatggaagtgagagctttgaaaacattgcaacacagtgaatgacttttttttttctttttcaactttcattttagaatcagggggtacatgggcaggtttgttacaaaggtacattgagtgatgccgagattgggggtatgactgaacctgtcactgaggtaatgaatatagtatccaatagttagtttttcaacacctgtgcccctctagtagtccccagtatctatcattcccatctttatgtccatgtgtacccaatatttagctcctacttataagtgagaacatgcggtatttgatgttctgttcctgtgatagtttgcttaggataatggcctccagctgcattcatgttgctgcaaagggcatgattttgttcttttttatggctgcatagtattccatggtgtatatgtaccacattttctttatcctatctaccattgatgggcacctgggttgattccatacctttgccgttgtgaatagtgctgcagtgaacatgtacccttttgacagaatgacttattttcctttaggtatttacccagcaatgggattgccgggtcgagtggtagttcaactcagttgtttgagtcatctccaaactgccttctgcagtggctgtactgatttacattcgcaacattgtataaagtgtcccctttactcccagccttgccaacatctgttatttttgactttttaacaaaagccattctgactggtatgagatggtatctcattgtggttttgatttgcatttctctgatgattagagatgacgagcattatttcatgtttgttgctcgcttgcatgtcttctttggagaattgtctgtttatgtcttttgcccactttttaatggagttatttgccttttgcttgttgatttgtttaagttccttacagattctggatattagacctttggtgaaagacatttttaaaacaataaagtgttgaggtagtggggccaacaacactattatttttaatatgatatcatttctcacattaccacatccattccctcatgaaattattcttttagagaaaagggaaagggaggaggtggtagagctagaacagcaggaaataaatacccacctcaggactgcagagcagcaaggcctcagggccctgaaaagaacgctgaggccaggtccgggtggggcaggaagcagagcagcctcgcctgtggctcctactaggtctgtaaactgccagatctgcccgcaaaccaccatcagcaacccagaggcgccccaggaagcaccctgaatgccaggcccaggggttccccacagaggcggggcaccagcccccaccctccctattaatgggagtggtttccaggtgactcatatgagtaaaatgcaaaaaatgaaatagagaccattaacatgattccaagtaagacaagtgccaagtcccatattgtattctaacttatctcaggatcagagaaggaaatacaaaaaggcttggctttagttctctcagaaccagagcatttctgtccttttctttctctgtaagaactgtacgtggggcttgcctaagcagtaagtgaaatccccacctgaatgatggctgcctccatcactagagatgcaagacagagtcggagtgttgggcaggcttttgaggctcatggctatttttctcccggctctgccaaacaccagctctatgaccttaagcaaatcgctttaccttttggggcccagttcctccgtgtcaaacatggcagtaagaatagcacctccttttggtactattagaatgctctgcagtgcccagagtcttaagcctagttggtcgtggaggcactcggttggctctcagtggtctcctctgacctcttccccacagggctgtatgttctggttggagccggggccctgatgatggccgtggggttcttcgggtgctgcggagccatgcgggagtcgcaatgtgtgcttggatcagtaagtggggcgagggggtaaatggtggggtgggggtgagggagcggcctgcatctgaagggagtcagtgcctctggcccctggctccagctcctccgtggactctctgagcccttggcatgcacttttcctccctcagtcttggtttctccatctcttatatatgaataatactaactagggccgggtgccatgactcacgcctgtaatcccagcactttgggaggctgaggcaggaggatctctggagcccaggagtttaagactagcttgggcaacacagggagacctagtctctaccgggtgtgatggcacacacctgtggtcccagctactcaggaggctgaggcaggaggatcacttaagaccaggagttgggaggctgcagtgagccatgactgtaccactgcactccaacctgggcgacagagcaaaaccttgtcttgaaaaaagaaaaaagaaaaaaaatattatctttgttcctgccttatatgggaagtgtgaaaagaaatgacgtcattggtgtaaagatgttttgggagtaaaagtacttagtaattgtaaggggtgactatgattgttctttaaaaaaaaatatttcacagtgggtgaggcagctaaaaggtttctatagccagggaagtgctgttatctacaaggaaaacatttatgtttgagatcaataacttaaccaaaatccctcttgtggcttattttaacaagcaacctctgtttaaaacaaaaatcaaataatttcaattaactgctatacattctatgtcagtgtagcctgagagaaacagaaaggaagaagaggggcaggaggagagaaagtgttgatatttctccacagagagtcagaaacagcagttttaataggcagcctctcatctctcattacttattgtgatctttggatttttaactctggccgtagcctctgatctcttgctatgtgaaatgtctgacttatttctttgccattcattccttctctttctcctactgttgagcacatttctgtcttgtttatcactgaacttagtttgatcagagcaaatccatagaccagaacagaaatccatccagaaggacacccctcacctcatctcctcaaagaagcctttccagaccacagaatctccagtcacccccttccccatgcccaggccgcatcagtgatgctccctctcctgaccttattttatatctttctaggtcttttgtgttcgtcaagtatttactaagcacataggtgccaggtggtgttctaggtggtgggatttttacatcactacctgaacttatcttattcactttttaacttctttacacagttatcgtatattcctctgtccaatccaaggtccgtgataacagagacatttggatattatcttgttcaccactgaatactcagcaccaaggacagtacctggtgcagaataaatgcctaataaacaattgctgaatgaatgaatgaatgaatgaaccacatgaaagcgattcagccattacataaggaaactaaggtgcaaaatatataaattgaaaaggtattaaattaatgaaattagtattttctctcctctacagttttttacctgcctcctggtgatatttgctgctgaagtaaccactggagtatttgcttttataggcaagggggtagtaagtaaaattacttataatgtttttctatgatggttaaaagtgttagaatattgatacccacaatagtgttaagaaaccaaataatccccattattatagtttaaacagaactttttaacttagaagtggtgtgcagaactgagcatatatgtatatgagtgtgcaggcatatatacatgctcacatttttctggggagatagttcatctcttccattagacttatgaagtggtctataataaaaccaaaaaaaaaaggatctctaatttaagattcttccccattgtgaaatggggtaacagttagagtacagacttgagaaagaatctagattctcatcccctgtcagactgccatttgtccttaaggattggcctggatgggtccatttcattctcaaagagcagagcctacactgctgtgggctagtgaagccagtttatatttgctgcccaactctaggtgtccagaataggttatcggggggacacacagaggaagtagcctttcttcctctgcaaaacacactgtgggatagaagagaatggaatggaaaaggaggaagaatggaaacttaagtttgctgtatttcacattaactcttgtgtcattaatattatgtttctgaacttattttagactataaaacagtaaacatgtagaatagtaaatgtcacctccttttgaatttttctaaagtaactggctgtgttcataggttagtttaaattcagctacatacagaagtagaatggaatcttaggacctgttgagatatctgtggatttgaaatcacaagcttttatactagaaaaagcattctctaagctttatatgatatctgaatgtagaaagttttccttggtgatgaataccttttaaaccacatcataaaaagatttgaatgcttttaaccaatggggtaacaggaatgtataagtccggatcctagctatgcatccgaatcatctggatggagcccaggaatctggggcccagttgatgctgaagcccagttgggcttgggaactgtcagaaatctttctagtccatgaaaactgttctggttagtctgtccttccatcctcaaaagcatcttagaaactccagaaactataatcttctccatatgttgctgaattatcctaaaatacctatggaaaggcagtattttttttttatttctacaggttttgtggggaacaggtggtgtttggttacatgagtaagttctctagtggggatttctgagattttggtgcacccatcacccgagcagtgtacactgtacccaatgtgcagtcttttatccctcacctcactcctaccctttcccctgagtccccaaagtccattgtatcattcttatgagaaaggcagtgtttttcaaaggtgtggaagaggagattttccttgatgaaaggagaatgtttgaaacttcccacccagaagtccttcatttttcctcgtatttcttcaggctatccgacatgttcagaccatgtatgaagaggcttacaatgattaccttaaagacaggggaaaaggcaatgggacactcatcaccttccactcaacagtgagtaacttcacttcttccttaaaatcacagcttctaaagattatgtgtgagccaggttctcaccaatcaccaggattaaaaataaaaataaattcagtaaagccaagtagcaccacctattttagcccttttgagggccacagtttgcattatgtgtggaaccctagaagggaaagatgtctatcacacagagttcacaagagagacagaagagcatgaacccaaaagacacatgccccaaagagacaaaagagcacaaacaaggttacagagaaaggagcccagataaatagcaggctttgtcagagggtagcattgtggtgtaacagaaacaagtgtgacctgtaagtcagaaaagctaatttctagctgcagctctaccattcaacagccttgtgaccttgagcaagttacttggcctccctgatacccacgcagctccctcatttgtagaatgaagggtcacaggagatggctacactcccttctggaacattcagtgggactgtgctgtccgtggagtgctcagagctacatgcagttaatcacagaaggcttacagaggagatgggccaggccagagttattctgattttttagacactgtgatatgaagaagtagctgtgaattcctgggccaggtgttttcaggtacctagttcttgtctaggacaagtatgtcttggaaagtggccaccatttatacatttatacggtttcacctcagctgccgccaggacctgaagcagcacacaggttcttttgtcttaaagggccagctagcctaagcaggacacctgtttgctggccaatcttcaaatctggtcttttggaccctggaatttcctgcagccacttctcccctcttccccagactattcccagctaatgagtccttctgcagctcataaaacttgagctcctcagcaggttaaatgactcccagtctgaaagaaggaatctaaagccccaacccctttctaaaaagtagcaatttacacagacactgtcaattagcttcttgccttgtttgggttgccttgagtcacttcccatcataaactcagatggctttaacgaagtcattttcttgttttgccagcatgattatgtgattcttcactctccttccagaaatagcagtctgggttgcagtgactgggcctcggagctgctttgccgcctcggcaccccagtccttagcagggtgcccagacttgtagctgctactcctcccgcctggtcctgaagtctcttttctgactctctagtttcagtgctgtggaaaagaaagctccgaacaggtccaacctacatgcccaaaggagcttctaggacacaaggtaagcttctaccaaggttcttactctacctgtagtatcatgctgctagcttaggaagccattgaaggtagaatctcggatgggatctgcattttactgaatttgctctagtggcagcatagaggattgatggaaaatgaatagcgttgagctgagagacccattgggaaggctgctgtccttgttgttagcaagagatgttaaagagggccctttagaaagtgacaactacaggagtggtgaccagagaagagaggagaatccattactgggtttttggcttcaccacctacatagatgatggtgtcatttatggagctgagggagagaggaaaaggagccaattgtggagaaaagaaaatgagctttgtgtttaacatggtgattttgaggagccagtggcacttccaaatggaaatatccagtaggcagttggaaaatctggtttgtggctcaggagagaggtctgagtgtcagcacttgatgggaaacttaaagctataaatacggatttgatccattagacttggaagaaaagaaggatgaggatagatccttgggggacaatttaagggtgggcaaaagaagagatgccaaagaaggaaactgggaggggcggccagacacaagtgaggagacagcacgggaaggggagggaatggtcaccaggcccaggtgctgctgttgagggcaattcagtattgatcagctgcctaccttatgttcggcactgtggatgcaaaggagaaggagaaaaagttcctactcacaaggagcttgcattgcagtctgataggagggatgaacatgaagtccatacggtccagtgattaggaatgcatggaatgtgcaacgtgctcggaaagcacagagggaaacgcacttaggagaggcgagaggctgggggatggggaaggctgacagaggtaatgatgtctcagctaaatcttcaagaatggaaagtaattatgcaagcattgggcagaaagcgggagggggaggcctgcgtgccgagagaccagcgtaagcaacaacacagaggcagaaatgacatggtttgtgtggggaactgaaagcctaagaaggtctactaataactgctgaaaagctggcaggatttagcatgcaaggaaccaactggtgacgtgctgtgagggatggattgaggacagagcccaggtttcagagagcgagatgtgaggagagagagcatcctttcaagaagtttcgatttgagccaaggacacagaaagaaagtttacaaaagtcaaagtccaaattaccattaaacatatagaaaatatagaaaattaaaagtaatatttaaaatcaatagcaaattaaaatgaagagatgctgttgtttaatctatgaaattgaccaagtgtttttcctttcccttaacaataatacacagttttggtaaacgtgatgtcgtgagcattttcagagaaattagtaaatagttttaaaggtcagtatgactatgtaagactagaggattaagtatgtttatgcccttctatccagaaattccacttctcggagtttattctaaggaaaaggaatcagaaatgcagacagacgtttttgtgcaaatcatgctcattacatgttattcataagaacaaaacactggacagacccttaatatgtggcaataggggattgtttggataaattgtagtatattcatatgatgaaatgttttaccaccattaagaatcatgatttcacctgtaatcctagcacttagggaggcagaggcaggcagattgcctgagctcaggagtttaagaccaccctgggcaacatggtgaaatcccgtctactaaaaatacaaaaattagccaggcgtggtggcatgtgcctgtgatcccagctactcagaaagctgaggcaggagaatcacttgaacctgggaggcagaggttgcagtgagccgagatcgcgccactgcactacagcctgggtgagagagcgagactctgtctccaaaaaaaaaaataatcatcataatcatgatttcaaagaaatttttagtgaaacaaggcatttttaaagttgtaatattaagtttaaaaagctcactgttgaatataaagaatgacctaagggtgtaggtgtgttttgtgtgtgtaagtatcaccaacaaatttattaccttttatggtgagaatacagacatttctttttaaaaaaaaaaaaaatctcttttccagatttctacaagaagcatgtattccttttgtgactaaagccaatataccttttgtacatttgttttttacaaaaagaagctggcaatgaagggaaggagggcttaatggcagaactagaggaggacagtctcgagtgttgttttgtttgttttgattgaagaactgagcatggtgataggataagtagaaatgtcaatggataaggagaggctgaatgtataggaaggaaaaaaagtaactggcagtgcaggcttcctgaggagctgaaagacccaaagcaggatatgaagttaactgtcttttattattatttatttatttatttattttgagacagagtctcactctgttgcccaggctggagtgtagtggcatgatctcggctcactgcaacctccacctcccaggttcaagtgatcctcctgcctcagccccgctagtagctgggattacaggtaggtgccaccatgcccggctaatttttttattttcagtagagacggggtttcaccatgttggccaggctggtctcgatctcctgaccttaggtgatccacgcatctcggcctcccaagtgctgggattacaggcttgagccaccgcgcccagccatgaggttaactttcaacagagaagggcacctctttggctctgatcagagaaaaaggagtcaggagtgtgcttgctacctacagcaatgcctggcactgaaggaagggagcatctaagtgtataggagaaggagaggaagagtgaaagaattgctataggttgactctcattttttccactaagtaagggagccactccttagaagagtagttttcaaacttttgtcagaatgcattataggtatctcttgtggatctgtgtcctctaaactgtgaattcccagaaagcaggagaaaccatatcctattgtctctgcatctaccacccctcttccagtgactaatgcaaggtagatgctcaagaaatgtttgttgaatgaatgaagtgtgataggaaatacgaagagagaagtaagggttttatatagctcagatggtatcaaaggaaccaaccagtgacaagtgaacagatctgaacaacctgagggtacagttggattgagagcatccctctacttaagagcactccaaataggagtgtttgaagttggagaaactaataatagttacaggtgatctatttggctttctgtctaagtttccccacatccatgaaggccctttgaatctatgctgcacaggtgtcttatgggcacagatgaaaggataggaactcacccagcacagcccagcccagccaccacaggagagaatggtcctctagctccaagacttggcttttctaattcttggctttcctttgtttaacttgaacctgttaagactttttagtttcttaataggtcatgcctactttgcatagtaaattgggtcaaagacatagaaagtattttaaactgtaaatgacaatatgaaaacaaagagttattgttttaagggtattttacttatttgctacaagtaagaagtggctccaaatttttagattccttggaaccagacaaatagcttcctccagttatatttcagggctccgaagaagccactggcctaaacatgaaaatctcacccaaaggagaggcttctatttttttccccaaactgcatttttgcgttaagcttattaggatgatgttatcaaagatgaattgttgaaacatgagtagaagctggcatggattaactctcacagaatgaactgtagagatggaaaggataggatcaggataatgactgacacatacaatcagtttttattcccgactttttttcctcaaaacagaattgcatcgatgaaattgagaccataatcagtgttaagctccagctcattggaattgtcggtattggaattgcaggtctgacggtgagaaagttctagaacttaccctttttgccctctaaaaagccttgaaactttgcatcttatttcttttcaagtgtgatagtatcttaagagagaattctcataaagaaaaaagacctttgttcacaatgtattacatcttctaagaacaaagctcataaatatattaatagtttgtcctctaaaatataatagaaatttcaactttaactcattatgaccttgagtgtgtcattgttattaacttcccgttttaaggctactatccataacctagataaatgattttcagttctgggtctctttctactgttacaaattcaatgcaacatatcaggttaatctctctcacctacgatttgaagaggcagcagagcatagagattaatagggcgagctctggcatcacatggtttggatttaactctaggctccaccatttgcaagctctgagatcgcaggaaaatttcttaatttttctatacctcaatttcctcgtctgttaatatataaactttataggattgccgtgaaaattaaatgggatactacatatacagtagtattacaaattaatataaataaagtgtctgggacatataacactcaacaaatgccagctctctgcataatctaccaggcaaaggcaatggcatagatggtattaagcgtagtgcatccagaccaccaccaggtggctctgtacttctaaagtacaaaagaagagtgtgtgggaagaatggatagcagcggacaggtatggcaggagttgcgagaggtggtaatggagagagtattcgatctacatcattgagatctttgtatgcccctttgaaagggtgggcttcacccttaaggaaaggggagtcaccaagagttggaagaacctgtggtagaggatagaggaaaggttggagggaggcaagattggatttggaaggcgggttaaaggatgatttccattgtccaggggttggatgataatagctaatgctaagatggcacttagtctctagccctctatgtagattaattcatggcctaaactaaggcaagggctgtgggaattgtgaggaaatcagtgaattttcagttatcaggggacacacaagcgccttccccttttctgtatttagagcacagaggggtggagaagtggctggaaatactctgctgaggccctccaaatcaagggacatttctcaggtcctccccacctgctctggggatagcctggctgcagttctgcagctccccaaaggacagtcctgaggcaggtctgagcgtgtgctgcataatggagagtttcacaatctcagcaaatgagcagcctagaagcattcacccctgactcgtgtcggcagtaggctgagactgaaggagtctcactgaaaccaggatgggtagggattacatccaaccttatggcaatgataaaggggaaatgcccatagtgagcctatcttgagtcggcacccccaggtttcttcgttagttcttttctctgtaaagtgagagttgcacaatgtaatcagctaactaaaagtgcattgggtgtcgcccgtgctacacactggtactgagtcctgtcatccagaagcttgaaatcctgttcctggccatgcccttacctgcttctgcccctcccttttcaaaacaactgatcattcatatcttattgaatttagcacttacagatcctagtctgacttaggatggaattgaggagagaaccagaaagttatagtacccattttttaaaataagcattgacagtagtttatggaatggtgcccacagatagggttccatgggctctacaaaattgtaggggaaataatagcggacaagaagactctttggcattcttctattcaaaccatggaagtggatattgatttcactcaagtatttaacttctcagagaactatccaaaaggtaaaagtcaataataccatagtataaaccctttagtttatgttttgctaaaactattgaattaaacagtgaagcatcgtttgcccttaaaaatggactgagaatgaagtgatgctccactttttttttctttttttgtgagacagggtctctgtcaccagggagtgaagtggtgcaatcacagctcactgcagcctcgacctcctgggctcaataatcctcccgcctcagcttgccaagcacctgggactgcagggacacaccaccatgctcagctaatttttgtattttttgtagtgacagggtttcaccatgtttcccaggctggtctagaactcctgagctcaagcgatcctcccaccacagcctcccaaagtgctgggattgcaggcatgagccactgcacccagctgatactccatttttggatgtatggacactgttgtaaaaaatcagagcttttccagcaatagaaaattatttagaccacaagcatatctaaacaacaagtggttatggacacagttttcaaaataaacatataaaagagatctaggattaacctgaaatataaaattccaaagccagtattgtgtctgtctttcacaggtattcagaacggttctataattctgaagcagggtaggttcttttaaagcagagccttgttacttgttaacaataataatacacatttaaacagttaatctagaattatttaccccatagccaaccttaagtaacatactaaaatgtcatttgtgactggtaattattggttataattatttgttaacttgagttagacacccaggaagtctgctgaactttttacctatcagtacccgtttcaaagtcactgatgagtgtttcttctgtttcagatctttggcatgatattcagcatggtcctctgctgtgcgatacgaaactcacgagatgtgatatgaagctacttctacatgaaaattgcaatctaaagctttcataccaaatgtcacaggagctgtctcccagctcatttttaacactgaaatgacattaggatctaaaataatttgctgtcaattgtacatttgcatgagtacgtatgtttggctcattactggtttaccccttgagtgaatgcctgtttatgatgactgagagcatattcatgtgtgatctgcgtgtttctggaatatgctttatacgtaatgaaatctgtttgctgggaattcctgattcttgttatataagaggaacaacctatttcgctcccagaaaaaaaagatcaaagagctttcagaaactttgagaacttggctatttagaaaaagtgataatgggtcagtttctcagactgtagccattgaaaattagatgcagagaattcagagatttcttcttaatggaagtaataagctgtaagaattgagagatcacaatggagtgttaaaactgactgtgtctaagttgggtgtaagggtttcctgggtttttttatatacatgctctccccagaatacagtaaaccacagttttagaactaaacacatctgtaaaactaaatatagcatggaaaatccaatttgaataagtcatgctttcctagaatttaaaaataaaaaagtcttcctctggaaagagaagtcacacagacaatcatgtgccctataaaagtgagtgtttataggactaaaaaacttttaacaactttttaaggaaatatttttgttcttatacaaaaacatgtaaatattgctttattactttcattttctgaccctgctgtaaactactgcaaccctcacatcctcaaagggacttttatgtcaaactcttctgtttctccaaatataaggaaaaaagactaaagcaagagatctggcagttgaaaattgtgggaaagagaatttgtatgggcactgtatctatgaaatacctcataacttacgtttacatgttttcctaactttttgtatttttcttgtatagccacctagagaattcttcatagattaagaactacagttttcaccacttaacataagtaaaacaaagtccttcataatttaaccattagcatctttggccaaaccaaaataaagaaaagcatcttctcctagttgtgtgtgggcaacagaaacaagttaaggaaacaaaaatacttatatatacacagaacaaaaataatgttctttttatgcaaatcccctgtgaaaataaaattttcaatgtttttttggtcttaacgcttcattttaacttagtaaacccaaatttaggatttacattggcaaatttttcagtgatttttaacgtgttacatttagtaaaccatagattttttaaaaactacattttgtaaggccacacataagtgaaaatacggaaggctttggaaacccccagatgaacttctatacatgtgaaaacacaagtctttgagtgtgcactaaaagtgtcacactcccaaaaaactcacaaaacattttgctaaaaagatatgactgcttgaaatagtctctctcccatggagaaccacatttctctttctgccatacttgctactgctactgattttggaggaaatttttctagaagaacaaaggtcatatttgaggcaagctaaaaacttaattatacatggctactttactgtgtctgtagctaaagaaaaattattttacaaaaattacttcatgaaatatagtttgtaccccagtagttgagaaatgtgaccttttaggcaaagaacaggcagtccatctctcttagctttagtttatctctctgcctgaagacaggaaacaggcccaagtgcatactcgggttctttccaactcagaatcatctctgattccacaaaagtgagtttagtttcctatctgaattaacaactttaaaggagactacaatagttaaaagtggaagaatagaaataaataaatttaaaatgaaattaattaaagtagaagagaagggttctgttccatgtacgattaatgtgccccttttggggataagctttccaaaatatgcgtatgagtaaaattagagaattccaccactaagcaacaatagattttatatgtgtgtgtggatatatatacacacacacacagaaagatgaatatatatatatatatatctgtataaatagacacacatataatatatatagatatataatccctatatatcttgaatctacaaatatctttatatgtatataatttgaatatatacatgtatgtatatacagatgtgtgtgtatatatatatatacatacacatatacataaattttcagctatttctgttcccctgaactaatttgagattagacccaaacatgcttttaaatgtctcatgccaaggcactgaattaagacttcttaatgttgaaatattttaagtgatttcatattaaattttctatatactgaaattgcttgtttgatttatcttaaagtcctattatatctttctacaaaccttcacgcaacttatctaaatgtcaaactaccaatcaaataatgtgattaaaaaaaaacagagtggtaacccttctataatttactattggtagttgacttaaaagcaacaccctaaggactcttactgcatatacagtcatctgtcagtattcatagaagaatggttccaggaccccctgtggataccaaaatccacagatgtccaagtcccttgtataaaattgtgtagtatttgcatgtagcctatgcatatcctctcatatactttatttttttaatttttatttttttattgttacataatagttgtacatacttttgggatatatgggatattttgatattagcatacaatgtgtaataaccacatcagggtaattgggatatctattacctgaaacatttatcatttctttgtattgggaacattccagatcttctaggccttttaaaacatataataaattgttgttaactatagtcaccttattgtgctaccaaatattagaacttattcattttatctaactgtatttttgtacccagtaatcaatccctcttcatccctccctgcctgctaccctttccagcctctggtaaccaccattgtatttactacctccatgagatcaatttttatagctcccacatatgactgagaacatgattcatcttgatgatatttgtctttctgtgcctggcttatatcacttaatatcctccaattctatgatgttgctgcaattgacaggattttattcattattcagccattgtcatggctgaataatatttcatcgtgtatatatagcacattttctttatccatctgttgatggactcttgggttaattctgtatcttggctattgtgaatagtgctgcaataaatatgaacatgcagacatctctttgatatactgattttctttcttttggatatatacccagcagtaggattgctgagtcatatggtagttttctgaggaacctccaaactgttttgcatagtggctgttgattgtttcctttgttgtgcagaaactttttagcttgatgtaatcctatttgtcaatttttactttggttgtctgtgcttttgaggttttaccccaaaaatatttgcccacaccagtttcctgaagcattttcccagtgttttcttctagtagtttcatagtttcaggtcttacatttaagtctttaatacatttgaattttgtgtagggtgagaaataggggtctggtctcattcttctgcatgtagataaccagttttctcagcactatttgttgaagagactgttctttccccagtgtaagttcttggtgcctttgtcaaaagtgagttagctgtaaatacatggatttatttctgggttctctattctgttccattggtctatgtgtttgtttttatgccaataccatgctgttttggttactatagttttgcggtatactttgaaggaaggtagtgtgatgcctccagcttttattctttttgccaacgattgctttgactattcaggagtttttgtgtgtgtgtggttccatgtgaattttagcattttttttctatttttgtgaaaaaatgtcattggtattttgataaggattgcattgaatctgtggaacactttgggtagtatggtcattttaacaatatcaagtcttccaacccatgaacatggaatatttttccatttttttctgtcctcttcaatttatttcattaacatttcatagctttcattatagagacctttcacttctttggttaaatttattcctaaatttttttgtagttattgtaaatgggattgctttcttgatttctttttcaaattgttcactgctggcatataaaaatactactgtttttttattttgattttatattctgcaactttactgaattcatttatcagttctaacaatttttttggtggaatctttaggtttttctaaatataaaacatgtcttctgcaaacaaggatgatttgacttctttctttccaatttggatgccctttttttctctcattgaattgctctggattgaacttccagttctacgttgaatagaagtggtgaaagtgggcattgttgtctttttccacatcttttaatttttggccaggtgcagtggctaacgctagtaatcccagcacttcgggaggccgaggcaggtggaccactaggtcaggagtttgagaccaccctggccaacatggtgaaaccctgtctctactaaaaatacaaaaattctctggacatggtggcacatgcctgtaatcctagctacttgggaggttgaggcacgagaattgcttgagcctgggaggcagaggttgcagtgagccgagatcacaccattgcactccagcttaggcgacagagtgagaccctgtctcaaaggaaaaaaaaaaaagaaaggcttttaattttttatttttccgtgttcaatatgtgatgttaggtgtgggtttatcttaaatggcttttaatgttttgagttatgttccttctatcaccagtttgttgagagtttttatcatgaaggatactgaattttatcaagcgccttttcagtatctattcaaatgttcatatggtttttgtccttgttactattaatgtttattgatttgtgtatgttgaaccatccttgtatccctgagatgaatcccaattaattgatcatggtgaatgatcttcttaatgcgtttttgaattctgtttgctagtattttgttgagtatttttacatctatgttcatcgggaatattggtctgtcattttctttgtagttgtatttttgtttggtatggctatcagggtaatgctggactcattgaattagctcttcaattttggagaatagttttggtagaattggtgttctttaaatatttgataaaatttggcagtgaagccatcaggtcctgggcttttctttgatgggtgacttttattactgcttttaccttattacttgttattaatctgctcaggttttctacttcttcatgattcaatcatggtaaattgtatgtatttagaaatgtattcattttttctaggtttttccatttattggcatatagttcaaaagtctctaatgatcttttgtattactgtggtatcagttttaatgtctccttttttgtctcttatttacttaggtctttcttttttccttagtctagctaaaagtttgtcatttttttatcttttaaaaaatttcatttttcattttgttgctcttttgcattgttttttagtgtccattttatctctactctggtttttattatttcttttcttctactaatttgggatttggtttgttcttgcttttctagttctttaaggtacatcatcagtttgtctatttgaagtctttctacttttttgatataggcatttattactataaacttccttcttaatgctacttttcctgtactccattggtttggtatgctgtatttctattttcatttgtttcaagaatttaaaaaatatttttaatttcttcattgacccattggtcattgaggagcatgttgtttaattttcatgtatttattcaattttcagtgttcttcttgttattgatttctagattttattccattgcagcctgaatatttgatattatttcaattttttgagtttgctaagacttgttttgtgcccttgcatgttgtctttcctggagaatgttttcatatgctggcaagaagaatgcgtattctgcagcagtaggatgagtgttctgaaaatgtcagttatgtccatttggtctagagtgtagtttacttttcatgtttcttttttttaattttctctctgtatgatctatttattggcaaaagttgggttttgaggttccctactattattgtactggaatctagctctctttttgtgctctgatgttgggtacaattatatttacaattgttatatcctcttgcagaatgatccctttaccattacataatgaccttctttgtctctttttgcagtttctgacttaaaaagagacaaagtgttgggtcttgttttttcattcattcagtcaccttgtgtcttttaaattggagaatttggtccatgtttacattcaatgtaattaatgataggtaaacactactgccattttattgttcgttttctggttcttaagtcctttattttattcttactatctttctctgtggttatcttccctggtaatacattttaattcattgctttttatttttactgtatctattataggtttttgctttgtgattgttatgagacaaaaaatcttatagttataataacttgttttaaactggtaactttcatcacaaagaaaagaagcaaacaaccaagttttttagttgtttttagaagaaactaaaaaaccctacaatttaactcatcttcccccactttttgactttttaatgtctccatttttaactttttatgttgtttatctctctctcgctttttttttttgagatgtaatcttactttgtcacacaagctggagtgcagtggcgtgatctcagctcactgcaacctctgcctcctaggttcaagctattctcctgcctcagcctccctagttgctgggattacaggtgcctgccgccatgcctggataattttttttatatttttagtacagccagggtttcaccatgttggccagtctggtctcaatctcctgacctcgagtaatccacccgcctcggcctcccaaaatgctgggatcacaggcatgagctaccacacccgcccttatgttgcttatgtcttaacaaattgttgtagttattatttttgatagatttgtcttttagtcttcataccaaagatatgagtggtttactcaccacagttaatgtatgagaatattctgaatttgtgtatttacttttaccaatgagctttataccttcagatgatttcttgtcacactttagcattctattctttcagattaaagaactgcctttagcatcttttgtaagtcagatctggtgctcatgaactccttcagcttttgtttgtctagcaaagtctttatttctccttcatgtttgaaagatagcttttttgggtacaatattctcagttgaaagtttttttccttcagcactttgaatatgtcttcccacttccttttggcctgtaaggtttctgctgagaagtctgctgcaagacatattggggctcctctatatgttatttgcttcaaaagaaaagcagcccttgctgcttttagaatcctttctttatcctttacctttgagagcataatcattgtatacctcagggtagtctcatttgggttgaatgtgcttggtattctctaaccttcttgtgcctggatattcataactttctttaggtttagaaagtgatctattatttctttgaataaactttctaccccatctttttctctacttcctctttaggccagtaactcttagatatgtccttttgaggctatcttccagatctcgtaatgtacttcaatcttttttcttttttctcctctgactttgtgttttcaaatagcctgtctttgaaatcactcattctttcttctgcttgatcagttctgctgttgagacactgtgattatgcatttttcagttaatcagttgtacttttcagctacaggatttctatttcttttttattattattatttcaatgtctttgttaaatgtctttaataaatttctgaattttttctgtctgttttcttaaagttcattgagcttcctcaaaacatctattttgaatttcctatctgagatatcacatatttccaccactccaatgttggccattggccccttatttagtctgtttggtgaggtcatattttcctgaagttttgtgctggatgcttttggatgctcattgatgtcttggcattgaagagttgggtatttattccagtcttcatagtctggccttgtttatcctcatcctttttcagaaggccttctaagaattcaaaggcagctgagtcttgagttcagtaagcctgtgtcattacagctatttcagcactagagggtgtccaaagcccaggtacactaagattccttacagattcctggatacccatccctgatggacttggaaaaaataagggaagtccctggatacccaggaaaagtccctcactctcttccctctctttcccccaagcaggagtccctctctggggttggccacttggtgttgtgggaggggtgactcaagcactctggccattgcagctggcagtgcgctgagttgcatctgatacccatgacctcccaaaccagcataggactaggacactcaaggcccatggctgctattgtctgactgcactgatgtttattcaaggcccaaggacacttttgtcagcaggtagtaaagccagccaagaattgggtctgccctgccagggcagtggattccctcctggtctggagtgggtatagaagtgtggtccaggagcagtggcctagaaataggggcttcaagattctgctaggtgctttgttttactgtggctgggctggtacccagtcgcgagacaaagagtaacatcttgttcccccaagcagaaggagtctcccttcttgctgcactgcctggagttgggatgaggtgacaccagcactctcgtggctgctgcagctggtgttgcaccaggtcacatcccaatcccactgcctccaagaccaatgcaacaccagggtttgcccaaagatggaagtcattatggcctgactgccacttgaatttatttggaaccccagaccactttactcagcctgtagtgaagccggctgtgacttgtgttcctcctcctgctgcaaaagattcccctctgccccgggactggttgaagtgctcccttcttgagcatcagagaaattctgcctggtgttgtgttctgtgtcagaacagctctgagttccaatgcaaaatccctcatattttgctttccctccactaagcacgcagattctctctctgtgctgcactgcctggggttgggaatggggtggtgtaggcaatgcaataccgtccttcctaccctctttaatgcatctttccttgttattttattaaaaccaagtgctgtgatctctcacctgatttcttagttcttttgaaagggctttattttgtagatagttgttcaatttgatgttcctgcaggtagggggccctatcactgcagggttctattccagcatcttgccccacttcctagctcctcctgtatactttaaatcatttctagattacttgtttacttaattcaaaggacatgctgtataaatacttgttatgctgtattgcttagggaataatggcaagaaaaattttatacgtgttcagtacagatgcaaccatttttttttttttggtccaaattgttttaatctgtagtcggttaaatccacagatacagaacccacagatactgaggatcaactatagttgtattttaattcatattttttatgtaaattatacctcttttccgcagaattgctcctttattatccatggttcaagctataaaattgcacactgacgcagggtccagtgtggttccccatgcagtcagcaactataattgttctccttaccctgtgagcggtgtttatagatttggctgagtgagaatgaggctggtgggaagatggcaatgaaggagatagcatgttttcccttctgaaacaggtttatcgaagatgaaaaggaagaggtacccttctgtcatgggtaaaatggagtttccacagccactgggaaagccactggaactttagtaggtgcaccacacccctgctttcctggttcatggcccctttgacatcctctttgaccaccagctcctcaatttcaacaacatcatttttgccacccctgggagagaacactcatgggccttcaaagctagtagattaactgcattatcttagttcgggctcatccaaatcaaatttatgttaagttagattttaagagggacaaaaggtttctactttttttcagcatgatccttcgttttttactataacatgtacctgtaaggtattatatgtaagtttcttttgaaaggtaaaaagacttcaccaatgcaaaatgatttttaaaaatatcctcattataacagcaaaggctaaatacattccagaaatccactgttcatatagtttatctcctggggataggggaaccaggaagaacaggagtaacatgtcctgaatgttgcaaagcataatctatgctgatttcataaagtttttagctaatgtatcagaaatcctttcaaagctttggtagttgtttgtggcaggaggcagcgttgtctgtataatttatgatgttcttatattaaatggaaaaaaattaaaagaaattaccaatataaaatgcctagcatacctggcaagtaatgaatattatctgttgtaattatgttaatactctgatgaggagaggttttggttttttggttttttgcttttttttttttttttttagatgatggagtctcactctgttgctcaggctggagtgtagtggcatgatctcggctcactgcaacctccacctcctgggttcgagtgattctcttgcctcagcctccctagtagctgggattacaggcatgcgccaccacacctggctaatttttgtatttttagtagagatggggtttcactatgttggccatgctggtcctcgaactcctgacctcaggtgatctgaacaccttggactcccaaagtgatgggattacaggtgtgagccaaggagaactttttgctaattacaagtcaaacagctttctagaaatgatgcataactgaacatatttcattgtgataccaattatccatttgaacacatttatttgtagaattaatgaatagcttttgatatctttcccaattctattttaattcaaagacttgagatcagtagccatagctagagtccttatgcttttctctgggcctactctaccttataagatgaaacccacactaatattggattggttttttactttgggggttactattttgtacatttggaaaaactataagaatattgatatgctaagatgggcaagacaagtctctgctgtcaagcagcttattatggaaaaaaacaagcaagcatattactatagataagtgttatgatactcattaacacagaataggcccgctcacctttggggagagtggtcaggagagaggcttcgtttatgttggagtctctaaactgagtcctaaagaacccatactaattagccaagtcaaaagtagtagaagaagatgaggggattgctggggaacagcatgcaagaagagcctgaaacattaaaggcatggaaacattcaaagaaaatgagtcaagtgctaaggagataaatagccctattaaagtatacttgagtgctatctttgtcctgaggccatggggaaaattttacatggtgagttacaaaattagacttgaaccttttaaaaatcacttagtcttaatatgaagaattactggatggcaaacaccagagtcaggaagatttgtagctaatgtactggaaagcctactaagaagtagacagacttaagagaaattggatgtgagagatgaaagaaaaagaggaatctggagtaattcccaggtttccgacttggcaggtggaagatagtggtacacaggaggaaaagcagattgtgatgatgacatggggtggagatgattataggatacccaagaggaaatataaacaagcactagatatatggccctgaagctcaggaaaataagtctgaactaaaactgtaggaatcaatataagcatggtaatgcccatatttgaacaagat

SEQ ID NO: 788 - DNA, 3210 bp, Homo sapiens
cctgccgctccccgcgctcgtagcgcgggcctggggactggggatcccgccgccgggccgcagcatggggcgcttccgcgggggcctgcggtgcatcaagtacctgctgcttggcttcaacctgctcttctggctggctggatcggccgtcattgcttttggactatggtttcggttcggaggtgccataaaggagttatcatcagaggacaagtccccagagtatttctatgtggggctgtatgttctggttggagccggggccctgatgatggccgtggggttcttcgggtgctgcggagccatgcgggagtcgcaatgtgtgcttggatcattttttacctgcctcctggtgatatttgctgctgaagtaaccactggagtatttgcttttataggcaagggggtagctatccgacatgttcagaccatgtatgaagaggcttacaatgattaccttaaagacaggggaaaaggcaatgggacactcatcaccttccactcaacatttcagtgctgtggaaaagaaagctccgaacaggtccaacctacatgcccaaaggagcttctaggacacaagaattgcatcgatgaaattgagaccataatcagtgttaagctccagctcattggaattgtcggtattggaattgcaggtctgacgatctttggcatgatattcagcatggtcctctgctgtgcgatacgaaactcacgagatgtgatatgaagctacttctacatgaaaattgcaatctaaagctttcataccaaatgtcacaggagctgtctcccagctcatttttaacactgaaatgacattaggatctaaaataatttgctgtcaattgtacatttgcatgagtacgtatgtttggctcattactggtttaccccttgagtgaatgcctgtttatgatgactgagagcatattcatgtgtgatctgcgtgtttctggaatatgctttatacgtaatgaaatctgtttgctgggaattcctgattcttgttatataagaggaacaacctatttcgctcccagaaaaaaaagatcaaagagctttcagaaactttgagaacttggctatttagaaaaagtgataatgggtcagtttctcagactgtagccattgaaaattagatgcagagaattcagagatttcttcttaatggaagtaataagctgtaagaattgagagatcacaatggagtgttaaaactgactgtgtctaagttgggtgtaagggtttcctgggtttttttatatacatgctctccccagaatacagtaaaccacagttttagaactaaacacatctgtaaaactaaatatagcatggaaaatccaatttgaataagtcatgctttcctagaatttaaaaataaaaaagtcttcctctggaaagagaagtcacacagacaatcatgtgccctataaaagtgagtgtttataggactaaaaaacttttaacaactttttaaggaaatatttttgttcttatacaaaaacatgtaaatattgctttattactttcattttctgaccctgctgtaaactactgcaaccctcacatcctcaaagggacttttatgtcaaactcttctgtttctccaaatataaggaaaaaagactaaagcaagagatctggcagttgaaaattgtgggaaagagaatttgtatgggcactgtatctatgaaatacctcataacttacgtttacatgttttcctaactttttgtatttttcttgtatagccacctagagaattcttcatagattaagaactacagttttcaccacttaacataagtaaaacaaagtccttcataatttaaccattagcatctttggccaaaccaaaataaagaaaagcatcttctcctagttgtgtgtgggcaacagaaacaagttaaggaaacaaaaatacttatatatacacagaacaaaaataatgttctttttatgcaaatcccctgtgaaaataaaattttcaatgtttttttggtcttaacgcttcattttaacttagtaaacccaaatttaggatttacattggcaaatttttcagtgatttttaacgtgttacatttagtaaaccatagattttttaaaaactacattttgtaaggccacacataagtgaaaatacggaaggctttggaaacccccagatgaacttctatacatgtgaaaacacaagtctttgagtgtgcactaaaagtgtcacactcccaaaaaactcacaaaacattttgctaaaaagatatgactgcttgaaatagtctctctcccatggagaaccacatttctctttctgccatacttgctactgctactgattttggaggaaatttttctagaagaacaaaggtcatatttgaggcaagctaaaaacttaattatacatggctactttactgtgtctgtagctaaagaaaaattattttacaaaaattacttcatgaaatatagtttgtaccccagtagttgagaaatgtgaccttttaggcaaagaacaggcagtccatctctcttagctttagtttatctctctgcctgaagacaggaaacaggcccaagtgcatactcgggttctttccaactcagaatcatctctgattccacaaaagtgagtttagtttcctatctgaattaacaactttaaaggagactacaatagttaaaagtggaagaatagaaataaataaatttaaaatgaaattaattaaagtagaagagaagggttctgttccatgtacgattaatgtgccccttttggggataagctttccaaaatatgcgtatgagtaaaattagagaattccaccactaagcaacaatagattttatatgtgtgtgtggatatatatacacacacacacagaaagatgaatatatatatatatatatctgtataaatagacacacatataatatatatagatatataatccctatatatcttgaatctacaaatatctttatatgtatataatttgaatatatacatgtatgtatatacagatgtgtgtgtatatatatatatacatacacatatacataaattttcagctatttctgttcccctgaactaatttgagattagacccaaacatgcttttaaatgtctcatgccaaggcactgaattaagacttcttaatgttgaaatattttaagtgatttcatattaaattttctatatactg

SEQ ID NO: 789 - protein, 219 aa, Homo sapiens
MGRFRGGLRCIKYLLLGFNLLFWLAGSAVIAFGLWFRFGGAIKELSSEDKSPEYFYVGVLVGAGALMMAVGFFGCCGAMRESQCVLGSFFTCLLVIFAAEVTTGVFAFIGKGVAIRHVQTMYEEAYNDYLKDRGKGNGTLITFHSTFQCCGKESSEQVQPTCPKELLGHKNCIDEIETIISVKLQLIGIVGIGIAGLTIFGMIFSMVLCCAIRNSRDVI

SEQ ID NO: 790 - DNA, 103190 bp, Mus musculus
  misc_feature (1)...(103190): n = A,T,C or G
tgttcactgactcttgttctttacatttcaccagctgtgactttcacagttaaccaccaaagattggtaatttatagacaacaggaagttgttgcacacaggatggtagaatgtgcaaattcaaggagtcagtatgatgattgtccatctactttcaaaatgaaatgaaagtactttttggctaagttgtcacatagataaaaggacaaaaatattatctaaactttcctttataagtcactagtttgagttaggaggtaaggtatatagggttggtctgatgttgcttgtattcaaatgctaaattctgtaccccaagatttggttgctctaagacaaggagatcttcaagtacaccagcttttgttgtgtaaaccttgccctctgttatccctgattggttaataaaaatgcctacatcctggcctgggtagatgagaagggacagagtgagattcccaggtttggggtctcaagcagagatcacaaggagtagagggaagagaaggaaggaagacaccatggggtaatgtgaatcatgagcacatggacatgaaggctgacctgttggagttagagttgtccaagaggaaaatggcaagtgataactcagggttattggcagggaagaagacaaaatagcaaagagggtttatatctccccaactctagtgtcttaagggttataataaatataaagatttttatgtcttctatttgggaactaaattatctaaggtggggtagaaacccccaaataatctttaccacaacgggaggtactcacatgatttaattatctcccccaaacccacctttattaacattacttgatgattgagtttcaacatactaatagaatggagcatactcagaccacataaaacaatataataaaagctggaagaaaccatattatacaatgttggaacatgatccaaaaatggagttgtgtggggggaattttgagtgtttgtgagaaaatgccaagaaaactggacaatagttttgtgaccttagcttcttcaaaggttttcttacgcctcaggatgtaaattgtctgatgctctgaataaagttggctattgcatgtgactttagtactactcattttaggctccactacctttagcgtggtaaacacttcaattattgaatataaataccacagtaatgaactctcaattaagtcagaatatcaagtagtactgagggagtaaagtcacagcttcccttgtttcctttcctaaacccttaaggcaaatctattattaaataaaagtaacccttcctaaatttcaaggttacagaacataatatgttcaggtctgacattgacttttagtgggtaaaaggaagtctgcctggcaggaaaacattcatattgaggctcctatccacagggagctttctctcaagaaaaggagagaggaaagaaatcacaggctaaaattctatagggagagccttacaatgccccccaagataaggtggcattgaaggtttttttccacttgagttccaaactataatttcctttgcttgggaacctacaacacaaaaccacaaagttatattattttattctaaggccttaaatctagaactgaaactcaatccagaacaagaactaatctagaccatgaaagaactctgttggcaatcagataaagtgagaaataaataacaaagagtgacagatggactagcatccgtaacaaaacatcatccttgttcattctccataatggacacatctcacagacccatgggaaaacagaatatgctcaggatagaatggattatgtggatagaaagaaggaaagatcagaagggttaaccaacccttatcactaacaggaacaaagaaggagtggcaaagtctggaacgtctggcatgtagataactggaaactaaatggtataaactacaatttactcaatgtcaaattttctgatggttcaaaaaaaaaatgaaaagcatgaccacatgcaaaggttactatgtacattagctctgtagtatattaaagacagctgacaattctttctatctcatcctatcaaagattggtatctactgagtaaaccttgatgggatctactgggtaaaccttgaaatttagcctggtgctataacttgcttaggccaaaaatcaaaaaatagaataaaagtgacattaaaggcaccccttgaagtttttctgcttctagttctagatcctagacagccttgtactctaaagataaataaatatctgttaaaagagatctgccgtctcccattctccacctgatgccacacctgaggagcctgtgggaagtcagggtagctagttctcacatcaggttgtgagaaaccataaagatctggcatttaagccactctgcttgggtgttgtttgttgtacagcaatgtgatactgactcaggctccctaggaagagaagtctttgctccctctctcttcttgccaaatactattattttttgctgagccccacctgccaagtacggaagagtgacagatggactagcgtccctaacaaaacatcatccttgttcattctccataatggacacatctcacagacccatgggaaaacagaatatgctcaggatagaatggattatgtggatagaaagaaggaaagatcagaagggttaaccaacccttatcactaacaggaacaaagatagagtggcaaagcctggaacgtctggcatgtagatagctggaaactaaatggataagactcagcagggcagactttgataatggatgtgcaatgtcctgtctggaagcaccatgccataggtaacaagcaaagttacacagaggaatagaaagcatgaataggggagattagctctctaagaagatcaatttccatttctttgtcagtggctctaaattccttcaaacacttctaggaaagaggagggatggatgagaggtcttttttcccccacatgatagaactctgctccagctacagtaaatgggtcaaatcattaacctatagagaccccagcactgtgtatcacctttaacagtcctcccacacagttaacagaacacggtcaattgccagaggatggggatatgtcaccagtggagtatggctgccttcctggcaaacaggaagccaaccacagccttttcatccataaaataaggaaaaagaagtgctttttctccagcactgaatcaaagttcatgtaaagcagagaaagggacccttcactatctatagtagaattcatcatctatatgctaaaccctgtctgatccgcagacactgtccctctttccacagctttcttcccatagcatacataggcatagctcttatcacttatcacatggaagctttaatgattgatctgtctgcctccttcactgagggcaacttcatgaagacagcatcctattcttttcagttatttgtctctaggacctaggtggcatttgctacactgtttagtcaatgttgaaagaagaatagccagttggtcaaaagttcctatgcgaatgcatagcagtaacaaatgaataagtgaaggatatatataggtggagaggctgttgttctgtcattaaaggtacctgctactctaaagacatgcttcctaaaacatgcagaaaacagcctcacgttctctgtaaactgttgaagtttcatctaaaccctaacattgctttcagttagagacacagaaacctcataatatcagcccttttaatagattaaaagatgatacacagagactctactttgttgtctgtcttagtcagggtttgtatacctacacaaaacattctgaccaagaggccagttggggaggaaagggtttattcagcttatacttccgaattgctgttcatcaccaaagaagtcaggacatgatctcacattgggtaggaactgatgcaggggtcctggaggggagctggatttcttcctctggcttgttcagtttgctttcttatagaacctgggactaccagcttagggatagtacaagccacaatgggtcaggccttccccttttgacactaattgagaaaatgccttacagctggatctcacggaggcaggaggcatttcctcaagaggggctcctttctctgtgataactccagctgtgtcaagttgacaaaaccagccagtacagtctctaaagtagaattactcgtagaaagcacccactaactctgtgtaagatgagtagctggctgacttacagcttcctgccctttgtcataaggtacttttactcactggtggaggagatattattagcctataggtgagaggggtaagggggagtgagaaagtcttcgtgaaaacatgcctcaaaaccaatgccagctttcacttttgctgcggctgtttcctggctgctttgctctttcccttcctgtttgtcccctctcatcctattgcctaggtttaattttggacatgaactctgctttgctattgccattgtgattctggtaactgacactgattgaacccatgacatcattgatctgatttgtgttgcctgctcattttgttacctgtaggatttccctcccaccctggaactctctacataacccaggtagacttcaaattcatggagatcctccagcttctgcttccactgtgttgaagttaatggatgcgccaccatgctcagctaagtcctcataagcagatgttcctcaggaaaagtggaacgagatgggagggatgccagtgttttcaaccagaccgcctagctttgacaatttcctgtcacttagggacttaagagagatctccagaaaatgttactgtcaaataaaagcataactactataggcaaggcaaaaggattcaatgagaaatgttgatgcacccagagattagtagaagttagaaggtatttctactgttaggttcaaaatgtaggtagatcctatacctctctgctattaaaacctaattgagaatgacctggagccatggaaaagatgctgctcctcaaagccgtgcccattcccagcagagcgcaccaatttccagaactatgccaaagcaggaagagagaagaaacaacctttgctcctatgcactgatttaactggaaatcagtagaaaagagttttggtaatgtaatttaaaatagtcaacttcctgggggccaatatggtaccaaaatcagacctagagataatgttaatattaatggtactttctacatgagcctggccatatgtggcaatgattttctggtcccagatgtctcctcctggaaaccgtgtgctctgagatctgttctagggtggtatgtgccagtataacattttctcattaacaacccctcttctatagtcctccatataccataatacttccaggtctttgatagcaattcctcaacctaaaggtgctagcacagtcactcaggctacactgtgaaccttctgaagagtctccaggggcaatggaaacatggatatacaaccctataaaaagagagacacaaaggggaaaaattaaagctttttttcttctgtcttttctctgaaaaactaaagtgacatgaaattaaaaaacaaaacaaaacaaaaaaccctactccttagagtccgtccttaccacccccctcccatggtaagatccacaaatcaaactgaaccagatgggtgtctccatgagatatagcagttcatatctcagctttttataggagtatgcccagaattgggaggttaaaatgtacacttgcttgggatctcaaagtctgcagatacagaggcagataaactagtcctgggtttatctttgctagaccagagtcctttaggattcctgtaagaagctagacatttccagcagagtgacgcattcaaaagcagatttctaaatctggacctattcagttaaacacaagtctgtaagtgcgaagtgtgatgtcatacagctagaaatagcttcaacatttggaattacaagcctgtctctctccctttcttgaaggtattgttattatagtcagtacattcagagtctttggaaattacttggttgaatttcattcttcaaataaagaaatctgggaagcaataaagatgcagaggcaggacttgccatggtgcccagatttctaagcctgtaccttaaaagtaaaaaccctataatccagcaaaatatcctaaggtgttacaatgaatactgctgggtatttagttaaatgatgccatgagagaaattagttttgaaataaaaacacaccagacaatgttcaacacggttttataaatgtcccataacttcatagagaaggaaaaacattcttaactgttgacagacagtcctctgtctatctattcaagatttccattttcttattttgttaatgcgaatcacttcttacattggtctagtaatcctatctttgtgtaaaagggtggttagactccatctactaatttcaatggcttttaaataatctatctgctccatgctcctgagatggtttctgactacattagtaacacagactttgccagcagtaccctgtttgatttactcactcacatgcatccagatccgggcaactggcgaacagagcattttctgaatctgcatattagctctatggcatagtgactgatgtcagttccaactttgccaaacatctctcatcactacaagctgtaccccattccaaagtcttaagtctgctctctctttttctggagcaagctcccttccacatatttgctatatggattcaacaatgtgacaatcatgtttgttccttaaagtgctcctgctgcagtggataaaaataacttcttactgttgcctttgcctggttgagggaggcagtgtggaaagatgagaaattgcagccacattttggatatgtttatctctccatgtttatccaaacccacactattcttttaccctgagtctccaactcttaatcctagcatgatgtgacaaatgtaaaatcataagaaaatttccaactttgcgctacacccgtggcttctaagttgttttagtatggcggttcagtgaggcactgtcagcttctatgaacattattttaatctttgctgaattggaaaactaggtgctttattgcacaaaatagtctatggcatgccttctgtaagcttctggaacagttgagggaatgtaagacacagacaggcaagtaaacacacatttaatactaaggtaacatggaccaaaacgggggaaaaaaaaaggagttattctaaagaagggtgtcaagaaagaaagaatgttctcccaatttatttaatgttttccttatgtttcctctgaatggtgcttgttccttgacaagcttttcctgcccactgcatctaacacttcttttctgggatggatcaagaaccttagctgctcagtgggtttgtttatttacttaccctgccattcctgttctcatcctaaagaacatatgtctgcagagcacacggggagaagagaagtgggtgtccgtcattgtgctcatttccctgaactgttccaccaaattgcttttttatatgccttttgcaatctcatcctatccagctcaagtagcctggattagaaaggctgtctctggagtccttttcaaagggaacctcccatagcttttaagccccccacagttgatgatgccgatattctgtatctgaggtattaaacaagaaggaacaaaaagctgatggggacaggcacaaagaaatacagtggttttttcaccagatagtcattgttggaattgggtgggcatctgcaacttccctagttcagagtgataaattgtcatttatcagtagactgtgtgttctctcctccatctctctctctctctctctctcttctctctctctctctctctctctctctctctctctcttttcctgtgtgtgtgtgtgtctgtctgtctgtctctctctctctgggtatgtgtgtgtgtttgtgtgggtatgcacccttgtgcatctcatgcagctcctgctactgtccagaagttttattccagaaaaagaatctgtgtgtaaatgggaattcttaaaaccaagtaagacaaatcatactctgaaagggtcactgctttcttcatacttagagaatagtatgcctgttttcaaacttccagtaaaagtaggcaaaacatttaataatgacttagcaacaaaaggccagcatctcagattctgtgttttaaagctttgcaaagaaaaactattcgaggtctcctgacttttgtatccaggccattccatctcagccccaatcttgggctacataacaggctccagagacctggaacctggggtgcttttcaatgagacaggcaggagctgtggcatttgcttctcctctaacttatcaacgcatacattgaaggcactcctgcaaatctcagttggtttcaaagtggcctgcctgtaatccaatgctgcataaagctttagcattacaaaagaatccttcagaatactcatcagcacccttaggacaggtttacattaaaaatgctttgaggcttgtgacctccaacaaaacaattcagtaactataagtgtctgtgctacagaagaagaggtaggatgcccaacagcggaagtcatcccagggcctggtcttttccctggtagtggtttaacctgagaacctgattctctctctctctctctctctctctctctctctctctctctctctctnnnnnnnnnnnnnnnnnnnnnnnnnnnnnnnnnnnnnnnnnnnnnnnnnnnnnnnnnnnnnnnnnnnnnnnnnnnnnnnnnnnnnnnnnnnnnnnnnnnnnnnnnnnnnnnnnnnnnnnnnnnnnnnnnnnnnnnnnnnnnnnnnnnnnnnnnnnnnnnnnnnnnnnnnnnnnnnnnnnnnnnnnnnnnnnnnnnnnnnnnnnnnnnnnnnnnnnnnnnnnnnnnnnnnnnnnnnnnnnnnnnnnnnnnnnnnnnnnnnnnnnnnnnnnnnnnnnnnnnnnnnnnnnnnnnnnnacacacacacacacacacacagagagagagagagagacacacacacacacacacacacacacagagagagagagagagagagagagagagagagagagagattaacactctttaacagtgactacttagggaagtgcctgagggaggggggatcttgcagagcaaaggctgggcttggaagaaagccacagtacaattgcttttccatccaggttacccagagagctcacacctctgggtcctccccttaggatcaggtaaagcaccttcaagttgaagggtaaactcccacctaagccccttgagaccacacaacacaaccacagctactttccctggaaaaaggggggggagggagttgggggggaggggagggttaaagcaacagagagacactgagaaaggctaagagttgagagggcatctgtatccagaaatcccaagaaattaggaacaagagagtcgagtggtgaacttcccaagagcagttgctggagtgaggcagggtctctgaagaactgaaggacatggccactactatgtggttagatctgccagaggccaaggacaacagaagcattgggtctggggtatttggtacagctgggacagaaaccaccaaaccccagtgcgcccaccttgccgggttcaaattgtccctcccccaaccctgctcccgttctcccgccgtctttgctgagtccagagatgctccgccacagacccgggaccccttaggcgcctcttcccgtccatctgccaaatcgcaacgcctgtacttttccagctccctctttccctcttgaaattgaaagttattgaggtcgctccgggttgttgctcctccccgtccccgagctccccccgccccccgcagccatcccgtctccccctccctcctcctccttccctatggggtgctcctagcccggcccaacactggagcggctcctgctcagaacgccagaagcagctcgggtctctccagcgccccttgaccatggctgcggtacccacggcgtccgcttccctgcgctcccggggtccctgccacagccgcagccgctgcagcctctgagccccaggggccactgctcgcctggattccgcccgcagccgccgctgctgtgcaaccgaggctaacctgcggccagccaggaggctcctgcaaccttcgctcgcggcgatgacagccaccccagagcagccggctgtgttcggacaatttgagaatgcaattgttggtttcccggtccacccgtcccgcttcgcttgccatcacagcacgcctgttggatctcagtggagaagtcccgctgctctggtttttctactcttcgtatagactcgcctaacacctacatacatatttttctttaaaaaaaaacattaaatataactaacagtgaaaagaaaaaggagagaaaaaagggaaacattacagggttactatgcacttgcgtnnnnnnnnnnnnnnnnnnnnnnnnnnnnnnnnnnnnnnnnnnnnnnnnnnnnnnnnnnnnnnnnnnnnnnnnnnnnnnnnnnnnnnnnnnnnnnnnnnnnnnnnnnnnnnnnnnnnnnnnnnnnnnnnnnnnnnnnnnnnnnnnnnnnnnnnnnnnnnnnnnnnnnnnnnnnnnnnnnnnnnnnnnnnnnnnnnnnnnnnnnnnnnnnnnnnnnnnnnnnnnnnnnnnnnnnnnnnnnnnnnnnnnnnnnnnnnnnnnnnnnnnnnnnnnnnnnnnnnnnnnnnnnnnnnnnnnnnnnnnnnnnnnnnnnnnnnnnnnnnnnnnnnnnnnnnnnnnnnnnnnnnnnnnnnnnnnnnnnnnnnnnnnnnnnnnnnnnnnnnnnnnnnnnnnnnnnnnnnnnnnnnnnnnnnnnnnnnnnnnnnnnnnnnnnnnnnnnnnnnnnnnnnnnnnnnnnnnnnnacaggcgcatactgagagtcgggttcccccagcacatctcctctctgctcttcagtctattacacaggagagtattatgtcctggctgtgtgaaactgtgcctttgctggaattaaatggatgcctcagggcagcctccacctaaattggtgcaaggcatgcccgcatctttcagagattcgggaacagatgtaagggtggtttctctttttgttcccgggtggcccagcacgctgttgtcagtgcccgcaaaggttgtcctttcgaagagctaaggacaaccctgactctaccgagggctcttggcccccctggggtagttactaaggaaaactaacagaaaaaaaccagtaaagcaattgctttggtagcttggatctggggggttgttcagcccatgaccttgtctggttcccagatgagatctctttcccaagtgtccagcccacaaaacccttgaggcagggatgttggtagctcttaggacacaggaccacttgtgtggggtggaaatttagcaatctcctctctccactgtttgtctctgtcctggcccaggacgtgagggtcccctgaaagctccctttgtacctctagcccaagccagacaaagtttgattcacctgaaaattgcctttaaaaatcgtggctgggcgggaataccagaagcttggagtccgagttggccctattgcctctaggatcgcttctcagcgcaggagagcctaaactaaacatgtcagggcatccgatttattattcttggcctctgagtggtttgtattctttggaaccctcccacccactctatcgctcaggccctgctgctgcggtatactgaagcggcagcctggggggccacatcgccactcctggccagcttggtccgctgggcactgagtttcggggccagtgaggaaagcgaagctaggaagaacacggctgtttgccccgcatagctcatgccaataggcttatcccagtctactccattctgtagtgtcccggaccccggagctacacacttgccggggtggggcagggtcctgtgtctcagcatcactggtacctgagtttttggttgggtgcgggggcttctgtttctgaaagaaataaaagaaagcaaagaaagtttgttatgcgttcgttcccatctctacaccccaaaggaccagagtggggaaactcagaatgcgcacatctgggctggaactagggcgatgatttgtgaagtctaaaagagactgcttttctctcttcctgtatcatctcaaagccaagtcaaaggcgccctctcgttgtgttgcggggttaagaaacaaaataaatggaattgagctggaatttcagtgattctatggtaatgggtctggaaaagaggtctctcctgctgcactcttggtgcggctgctcttgagtcggcttttgcggctcggttgctcctgcaatcttgggagaggggcgaccccttgcgtcctccgagaagacagaagaaagatttggcaggcgcagcatagctttttgcagtaaggatccttgttaaatgtccagaaacttgaaattaatgcagcaggtttataaaatcacctggaccgtgtttttaaaaactacctgaataaaaatctccttaatagtaactgggactatttttataatgaataataaggcagtagtcaaattattttaaaactggccagacatttctctttttccaccataaggaaacttaagagagcaattgggagtatcacgtttgctttgtagtaatagcgtcattttcttaaaggtttagaaacatcactaatgagagaggtagaaaattaaggttaaaaataaaagactcctaaagtctttttttctttttaatgtggtctcttaaatatcttagtaccaaaggtccttactagcaaagattgtcatttacggtgttaaacatgttcagatataaagcgtcatgtgaatattcttgtgtttctctacaataatcaatattctattgatcttcacaaaccaatgatcctaattattacagtctacgattttctctataaaatatgcaatgctttaaaacagaagtcttatactttttaaaatgtctctgtagttatggtgcataaacacatgattgtactgattttgattgatatacagtacctagagatgacaaaataaatttcttcaagataaaaacgtaaagaaagcatttactcactccagaaagtcatcattcagcaagatttttagcagcaagctctagctttggacactggacattaatttacaaagcctaaactctttctttgatctcatttccagctcagcctttgaagttttgtaaaggcaacctttgaattttgtgttgcatgttagtagcatttaaacatcatttttatcatagcaatcataattctttcctaatgcatcacatttttacctggattatttatgtggggtcagaaaccttcacttgaagtgtagaaactggtactacagcatctcccttctggagagaaggggggtctaagaaacaggaccttactagccagctagatagccagtcaatgaaatttgtcttctcatataaacgttcctgccttttatgtatttatactatgcgctgaacctgccatagagaggatatcaggctaatgaaataatttacttgatgatctccagaattccattttcccaatatgtttagagactaggctattgtgcataactggtcatctttataagtgttgttgcgatgatgctgacaaatgacgaatctgactagagtgttttctcatcatacttcattatttgattatccagaagcctccctaggatgattctgcccccgagggcatttcctctctgcaagagggtattaggtacaatgttctttaattgtgggcatctattaacttcatcttagtttttcagatttttagatcattcgtgttttagaaattcattatatgcctaccaattaaaatacagctactacaatctgcagagaggggtgaaaagaatcaaaagtacaacaaaaataatcacactaataatatatttatcggaactgattacttcctatgatggtgtagggatgttgacatatgtaagcttttctgatctcttggtgattttattgctgatcctggtaatcatgttaacagataaaataaaaaaaaacactgttaaattgaaatattaatgtaatgttttatttggagatttggaacaatgccctgtttcgtttcttgcctacatttgccacctgcatgccttagtcttaagaacaacagttcaagagagatctgaccaagaactgttggagaaagtgccttctatggcgtatcacatggtatgaatgcaaatcaaagataaattcaatttcctaggaaatggtggcacatgaaaatacaaacaaagtgcatttccctttctgagctctaactaaagcatctttgagctaggaagtttttttttcccaaaatattttgttgttactctattttaaatctttattttctgctccagcagaaagattttactaaatgccttaaaaaaatggtgccttagcccaactccttctaagcattgataaaagaacaagtgaaaagaatttaccacagtaatttcaactttcctttgaacatgcagtattgaatatgaacagtattttaaattttacatagatggactatttctccaatgaaagagttccccgggttttaatgttcaacaaattaggtttccagaaagcaaaattacaacatgcagtaaaatttgatttttaagttgttatagaaaaacctttgctacattactacaaaatgactttaatagacatttgattcttttagattatttgaacctgtgtaggtatctccagattgttactaaatgtctaaaaatattttctagttaaatgccaaatcatttaaatatgtgtagtgcttttcattcttcataacaaagcatttcagaaccttatctaaatatataatactaaaacattactctgaaattacataaactttcaaaaatacaacaattacagatgctctaattccctatttttctcttatctctctttaaacactcaagttgggattttcctgacctcttcctcttcctcactattgagtcattcacctattcccactcaccacaaaggctatcccaggctttcagtgaattcctgaaatgccagcacagtgcatattgtgtttcatgaaatgtaagaatcaacttcagttaccgttagaaaaatatcattacgttttgaaaatatagcaggagtcagtcattacagtgtgtggcaattgtatttgacttgatgagggcactttcctcttcttataagacattgtttagaggtgctatttacaaagcaataatttgaaatatattgactcataagttaggtagattttttttcttgtcttttattttgttggaaaatacagacagctttctttgatatattttttaaaagcttacaataagtagatcatatttaaaattaccatctattgagtcttctagtagatttgaaaagctttgcaattacacatcaataaaatacatgaatataaaatataaatatgaatatgaggaacatactggagatggtttgtttttctattacacccactcatatcttttcattcagaaggctgactagcattctgattaaactgttcataaagcaatactaaaagacaatggaattgtaacccattattcaaaggttagagttggtcaaggacactatagttggtgaggaatagctgggtgccactgatgataaaaactcccatttttccacctgaaaatcttcaaccacgtgacacttagataaaatatctgaaatcatctcctatgtgaagagtgctcattgacaaaccatgcggttacagtgcctctgctttggtaaaatcatctcttccttaactataagggcagcatgagatgcagttaccatttgttaacactaaacgttgggcattctttaaaagaaacttagtggtaccaaacaaccttctcactcagttatatagatggataattataactgttacagtatgtaacgggttgcaatttctttacaattcaggcaggttcatcttgtccccagctttggaatccttggagttgattcagagtggcaagcagagaaaggcttcggtttccctgtcctgacaagtgcttagagatggcctttgaagataaggaaaaattagctttgttaatttacttttaaggacaaaaagcctacattataacactggatgatagagccaaataatattgtagactactccttttgatgaaatagatagttctgggcacttcatttagtaggaagaagaagaagaccatatttggcatcaatttaggagcataaggattcagatgttggtcaatggaaaaatgatgcaaaggcagacaaaaatgagacaagtaggtttggtaaggaatttattttgcttttgaactatctttagtgaggagctaggtagacacttaggacttgagccccagcttcagaatgtaccaatggctgaagtcaaggacggcagtatcattcattaaagaggatggctggacacaggagaataaaattgcgggatgctttcttttatttatcaaaagtgtttgcattgctagcctcaagactgcttcatgtagtgtcagtgagattacattaaattgctttcctcattctaaatgctctaatgtagtatttccaactgtggtttctcttttattatagtactttctgttatgtaagagaatggtggctgttgtcgtgaatgctagttccaaactgccaaatcctgtgatgaagataaggcttggaaccttttctacctatattactttgccacaggtcataagaagacttgaaagattttatagtaatggaagatatatttgtataaggtattgaatgtttttgaaccacagtattggaccttgcatcccatagtggcattgctactttcaagtagatttctcaatgaacatgtgctaatttcaggatgggataaaatctgaaggcatctagttagctcatctactttgagcaacatccctaatgcatatttgatcagctatcataacagtcaggttcgtggtttctcactggctccttctattaattctgaggcttcgtagcaaagggagtatattttcccggtattttaagaacttggcagaagtatgagtttaatttagcttacctttgaactcctttctaaaattaatgtgtatattcactccccaaaattgtttctagaaatatgctcctgagcatagttgtaactgtatctcaatagaaagtgcactcccgaaagtgactggtatcacagccctcgttttatcactatataataaaaacgactaccgcagaatgtagagtaccagaatccatgagcttgttttacatcaccagctccctgtaagaaaaaagattaccacttctcacagctacaaagaaaccttacaactaaagagtataatcaccttgacaaaagctgtcatatacacacagagcatgtgtcattccaatagagaggtggtaaactaatatgtcctaagtatgttaaatacctcctgacaaaggacagctttataactgtcaaggccactgctgcattgtatatattttctttaatacacaattgcatttctctattaaagtgaatattatggtaacaataaataaattccttacataataacttctcacctctcagtagaaacctgttccttgaatatgtccacaaaatagcctcatttaactgtcacatcctttctagatggaatataaactttcattttacccatatcttatcatttattatttactctgttatcagagagatgatactcagttcctagtttgcaggtcaggtttaacttcaaagccggcactttggagagtctccctcttcccactccagcacattgggcacacaagacgttgtgttttcaatcccactttagactttcgtaatcccatagcttccctttgtcctcttccttctaaccttcccaacagacagtttctaaacaaagttgtagatctttatttttttatcacaagcactaaaatcacacaatttatttgatatgttctaaaatccttctccccaagtatgtctttacgtattcaagacaagatttatttaggcatgaaagtttgggcaaaactataattctggagttaaatgtcaaaagccttgtagataatttacaatcacaattggcattgccctgaattttttttttttttacccagaaagctatctttatgatgtttcatacaatctattatttatattactttcaccatgaacattaataataacctccactctgaatttttgctttatgggacgagatacaggggttgctgatgctgagttcatacctggagatctttaaaaataaaaacaagacaaaatgacgtaatctctggaaataggcctcagagagtcttatttttaaacctagtctgatgactctaaaacacagctgaaaatgatatactgtcagacccttaattcaagaatagcctttacagctgagtaactgttgaagacgatactagttttatgagtgtgtgacagagaaaataaacctgtgtgaagcatgataagggatgaggcatgtaccatcggaacagcagaaaaccatctctgtgcacacacggtgttgttttccataggaaactgataaactcaaaacactgactgttggttgcaagcaggactatctgagagagaatcaatcacttcattctaaaaaaaggggggagccaagtgcctgcaggaaggcctgatagtgaccttaccagatgctggatccctgcaacattgtctttgggagaaggtgattgcaccgctgtagtaggagagacagtcaacagagcaattgtagaagcaaaatgaggtataagtcacactcaaactgtgttccaaagctacttaataatgaacaactgctggtttgggatttttgttttgttttgttttgttttgttttgttttgttttgtttttagttcttacccctccttgatgtcaggaaaatcttaatggggaggcaactgcctaacaagatgtaaacattcctttcttttatggtctctgactagcttggattgactatggtgatcactatcacagctataaatagcacgggctacactttatccaatggatggagttttgtggaagatcatgaatttgcagacgcccttatttcactcatcctctgctattctctaagctgttgtcttcattaactcttatttattattcttttctagtccatgcagaaatttcaaaccttgccataaattaaggaaagctccatgtacaaacgaggtggaagtctgggcttcctgtcagatttcactgtgcttgttaagggggctctttgggaaaatttgggttgcaatgagtcactaggccaaacccaataaccacaattgccagaagtaattagcctgaagaaagccaggcttcttgggaggagggtcatcatagcatgcttgagacattgctgcgtggtcagacctagttacttgtccctaaggattgggagcaatcataagctacagaaagcaggaaatccacagaaaacaatgcttttccaccaactttcttctcaataggttattcaccctaagcatgcacagatgaaaatatatcataagcactgccggaggcactgtgcacgttacagtccccataagcgacctgtctgtcttcaagagtcaaaaccacacctgtcactacctcaggtctgctcctcctttcctgcacagattaaaagagccccagcaattcagtctttgtgaaagaattatctgggggagggggggagaacggaaagagaaagaaagaaatcctcgtaaatattcttaggtcaatttagacataatattagtgaaaggacaattatctataagaaaatggtaacccattattgcaagacgggaatgctaagatatgcacctagaaaagggctaagggcaaatctagaattccttgtactaaaattaaactcttttcgaaacctaatatcaaagccagtagctacacatgatcaagaaagaagtgtggctgtcctttgaaagtttcagtataagaaacaaaaagatcgttaagtgtttccattcaagaagcacagatggatctatactcaataatccagagacaacttggctttgaaccctctgtctttgcctggaatactcagtggctaccacctcatacaatagaactttaactgaacaaaacctcaaagcttccaagactcgttgtcctcaaattttcaaattttttcctaatttgcaatgactttcattctatccctttactactttggcctcaggttactactagatctttgtttaaacatatggaatcaaaagtcaaaagtcaaatattttaaatatacaaattcatttgcttgtcagatttattttttatttttattttttgcaactggcaatctccaggtctcttggcagatgcattctgtccttatatataatatgtatgcgtccttgtaatgaggtgcggtgaactgcttgttattttgaccaatataggaaaaccatacattccattgcatttggtttgcatttgacagtaatctggaaatagaaacatccagtctttctttcccagttgggttacaaaggtgcttttaatgattcccacgactccagccatcttcagcattcagagacacactgagaaccatgtgtcaatgactttgatatactgttagtgatctaaaggaaatgtgactaattctgaagatcctcatgaaacagttctgagccaaagaccttaatttaaagcttactggggggagaagtgatacagcgcagtacaaacctgttgcatttaggttggtatttatctcagtggatgggagtctgctcccagcatataaagcttgcatactgattccaggtagcaactgactttagaagcattgctcagaataagtttgaaagtttaatgtttcaacatacttacttctacacgtgtctttctttgtggacaatttattgagtctccaaaaacgatgtgttttctcttctctaaacctggaaccaatggtcatttttacaagagcaataaactaaagtggttcttcaaatatcttacttgacttgcttttcataactgaagtatcctctgttaatataaatgcttcaattctagcaggaagctccctaaaattcagagctgcttaaaattatatgaccagaaatcccctttctccccctctacccgtcctctccttctgggaatataccagcggtttctcaccattcattctgacaactgttctggtgtaaatatttaaagaaatcctttccattagagattaaacaaaggataagtaattgctctgcaatgatagatctttattaatgtttgcaatagcagatcttatgtcatccgatccatagacgctgacaccctcaggaaggagcaaaggaaaaggagccaagacaggaattacaatatactgtatgcaatcccaactgcaaaatactgattttcatttatccttccaaggcttatgtttaaataatgcacatagtgtagagaaaaatgaatttgttaaagttggaaataccaaaaatgagtgaccagtgattaaactgactgaaaaggtagaggcaaattacaaatctgtgtatcacttaaacagccccttgccatttcctaatgtgctcatcagacttaagcaacatgtgtgagatctgcactgacataagctctggttcctctattattgctcaagaattagcattaaaaagggtaaaggctgacctctcctgcttatatccaatatcagttgttaaaagagtgtcactctcagtttggagaagcaagcttccagtattgtctttctgcatttcttgtccacacagattttcatgtaatagtacacaccggcttccatcagcatcagggggattggttacagagtccagacctcaggtgctcagctctcttatggaatcagagggtggtatatatggctcatacatatcccccggcatatttaaattatctcttaatgacccatattacttaatacttataactagttcttacgatgcatcgtttagaggagaataataaagaaaaaggctaggcaagtttcgcaccgacacaagtttttgaaaaatttatttgaagttctcagtagaccatatattttcatggatgcagaggcataagtagattagtaggttaggcataacatagctaagcaatttaaactataaagaacgtcacgggttgaatgtcagattatcaatgatcttataatgtgggctggaaaataagcacatgccttggaaaacatgtttgtccttcctttgatgacactaaaatataagagtttgtatatttgaattcagcttaatcattgtcaattcacaacctaagagttattgttgctctatgatttttttctttataaagtaggattttgaagaaatttacattaatattatttcttataaaaattatagaactcagatgtgcaggtgcacatttgtaattgcaaaactcaggaaactacagcagataattttctgtgagttcaaggttaacctaacaactgtctcagcatctatactgagtttgtttcttccttgtctttgatgtgaagtgtacagtatttactagactagttcacgtttgaatcctggttctatagcattatttggtaacgaaaataataaacaggatctgtgtgatacaaatggaaacctcataaacttcattgtaagagactcgtgccttttgactgcccttctcaaaacctgtgttttcttgagttttgactacagtaagagaagactcagaggaaggaggcaaagaagtttgatttctaattgatagacatagtttcacaaatcatttagtctgtgattacgttgtagccactgtaaagcaggtctagtacttcttcatttgcttgagagtaggctactgaccttaagtcccttcaagagtgacatcaaagagtttgtttgtttgttttttgtttttgctttctcagcacttgctctaatcacaaagttatctttcaaagtttcatagatatggagttagggcttcaatttacaaatatgtatttctttgtatttttagactacattttaagaagataagcagaaacaaatctattggggaatagtacagggaaaaataaaactcaacttagtcctcattaaaataccatgcatttcacagaatagctccttatttaaaatttatcatgttccgcagtaaataaagtgactaaaacataccagaaaattactcttgttgtattttgacgatgttaaaatattgagttaagaagcctggtgtgtgtgtgtgtgtgtgtgtgtgtgtgtgtgtgtgtataaaagtagaatggttaggtaccatttctaagccatgacatgcacattttttagatatgtttgaatagaaatgggaatgatatttgcaatgagtaagtctaagtcttatccagatatttatctggagagcagcattgtggagatgaagcacaaagatgggaggaagcgcagactaaaacagtggaatttatgaggcctttcagcattttcttgtcttacaatttatggccaatgaataggagtcatcacttagtgtgacctttgtgacaatcacaggaagtatgttatgcgtactgtaaacgtagttggcattgttaggtaaagcttgtaatggagtggcatagtttggctgagcaaatttccattttgggtgcactgattaatttctagagctgaactttcacactccttcattaactggaattgcttttaccaaacaaacactaaaatattttatgtttaaaaattgtgcatttttgttcatcaatccaaggcatttctcaaaccttttatggtaacccaccccttgatcactacatgaaacataaaaccagatttacttaaagccctagcttggcaaatgcacatcaacatgctatttggatgtctactgtaagtttgttgatgagctttctaacaccagattatagctttaaagaggttctttcctaaaatataaaggcatgaaatcaatttgtctgagatcttttctattgtaatttacaattaactcatgaaggattttaagtaaagaaactttttgcatgtgttattttgtgttaccccatgcaacaaatatatgatacatagataaccatctgataagtaaaaagttgaaggagatcaaaagaatacagacattaaagaggcaaaatttaacctaacagccttcactgtgacactctgcttgtcattaggcctaccaaagaggatagtccagaggcaggggaggctaaaggaggacatccctcatctgtggagatgggaatactatttttgcttcattagacaaaagtcagtctgagacaaggaataaacctggataattggcagggttgttgctgggaagtaaaaggacattacactgtcttatagcagaagatcaatgagatcagagctggcgtttctaaatggttattctggttgctaattggcatcagtggtattggtgagaaaggaaagttataagctctgttccttacagacaacaatgtgtagaaaaggcagattggaggcagggttcaatagggttcctggatttctgattttaggaactaaatggtgataattgttgctacaaacttaatatctttgtttaatttgtagcccttttgaagagaactacctgttcttccactgtagaagtactgcacatgcagcaaatcatttccttgctgaatggcagcccctctcaaggtcacaataggctacttccctgatctatcatttatgatgaagcaccatttttgaaagcagacgattcttaccaaattatcaaacttgtcatcaattagcagcttaccattgagaatgttcttatttctatccttgggatgaagggccttctaactctttctaggctggtaaagtaccacagtgacattgtcatcagcagcctatttcactgtagtttgcatgatatatggagactgtcacatcattacctgagttgctcaatatacttttaaaatggacagagcagatttagctacgtaatctaactaaatccagagatatcatttctacagtattttattacaagcccagtaagcagcaaaaaaacatatcatgaaagaagggcgtttactttttccccagtgcaagtatgtgagtttttctacactgcatagatccccaaatatttccactgaaatatttcataaattctttgggtttggcttcaacatcatttaggctaagggaaatatttgttgtatgtgagatttttactggatgagaagaaatttactggcagatcattaaggtcctgttcaatcacattcccatcaggggaagaaagaactatctaggccatagcaccatgttaaaggaaaagaagaagaatatggggctctatataggaagacagttttaaataaatatttctatacttccataataatgattatgtatataatccataggtataattaataaatacatgaatatttatcaaattaggcatgtatgcttttataacttaggagttaacaagctatgcagatcttagtgttctcatttgaaaatttatggagaagatttataagaccctattaaattccatactagcagcatcctcatgaatcttcttattgcatatgtacctagtaattctatttactttctctctccccatctttccatttatctgagtacttttcctcctaactgatgactagagcatgtaaataccacaacaatcagtaatttgtcatgtccttatttctgttgcaaaaagcttctaacttatatagatgtagtattttctagatagaaaaacagaaataatttcttaagccatcatatgcttcttgagccaaagaccaagatttatcacaatgctatctgcagttctgggagactactatcagcaatagctgaaactcttcatttggcaaagatgtgattctcaaaccatgtggttaatccaccctttgtgtcagagtcacctgtaatgcttcttcaaaataaagataataaagtctaccttttccattcccaaatcaaaatttttagaagtagaacctaatcatttgaattttagacacacccttgggccatagagacacaaatacagactatatgttcttatatgtgcactggaatgttggtaagcttgaagacctgaaaaggatttcagatccttttggaacaggaattataggcagttttatggggctcaatatgaattctgggaactgaactcaggtaccctgaaagaactttatctgcttttaactactgagtcatctcttcagcctcactgttaatatttttattattcatctcatctgtctcagtctggtaaggtccatgtctttggtgagttgttagccccacagtcattccttcctggatgtgttaatgggtcatcagtaatactcacagtcttttttttttttttttttttgtggtccttacaaagcagcttctttctctggctcttagtaaatttctgcctcccatgcaaccaaagaagtattagcatacaccctctttccattctttagtattggctaaatcaaccagctatctcaaattcacacagaaagagacagactgtgtggtacaacaaattatcttctacttgtgggttcctttctttgcaacagggtctcactgtatatcctggcaggcctagatttggtatatagaccaggctgagcttaaactcacagaggcctaccagcctctcccttgaaagtgtaaagattaagaaagtgtaaggattaaggaagtgtaaggattaaacatgttgactgccacacccaactagacttaggatttaatattttttttcttttactagttccttgagaatttcacaaagcataccttattcatagtcatccctcctcacacttcctaaatccatcactctctccctactcaacaaacttgtttgaggacctgcactgttagggaagttgatttcctgatccaagcagctgtcaattgccaacagctccttggctagggataagacttcatgcccacctcccatttccatgctgggatttggtctgccatgagccgccttgggtatgctgctgcaattactgtgagttaatatgtgcaggtgcctttctgcatcttgaggacacgttgtcttgtattcacccaccacttctgcttcttttattctttctgcccctcttccacaatgatccctaagccttggtagaagaggatgtgatagagatgtaccattttagtaacttggatacttgtagttttccatgttaatcactgtatactgcaagtagaaggttctctaatgagaactgagagatgcactaatctatatgtataacaataagtcaaaagaaggtgggttaaaactatgtctatttagcagaataataatagtaagttcttccctaggcctatgatttatctagtcacaggttcttggtccaacactattgttatgtatggagtttttttttgtttgtttgttttttgttttttttttattgtacagcataacttaaatcactcagaaagttagttactcccatggtgttcctgtctctactacatcagtggatgcttctttccaaaccattcatttttatagctcagaagagtcatactttggtaagatggatgattattttgtatcttctagtaacatgtaaagcaccttctagaactataaagattatcctgtaaggatgaagcttccaagtgagtaccatcttgattttttcatgttctatcactcaagtacattatctcttcagcaatagggtcttactttaaagttctggggggtaattaatgtagcattggtattacaatatagcaataacattattctataatctttgattggagtctatgtgttctcaattgttagcaactccaaaaaagggtatagctattcctggcacggttttttgttgttgttttgtttttgttgttgtcgtctccttttgttagtttctggtatctcatagggggcactgtcatcctgtcaaaaaggggctccatcataactttgcatgtgtaatcttttatagtggtagatagcttcccatgtgacctttccgaagatctttagtgttattcatgcctccctctcccttcttctaaactgttaagtcacctcaaccccaattttaccttttttgttccatttatccctccaaacctttatattatttttcctttccttgaataaccacaaatgctggcttggatgaggggggtgggaaacacttattcactactaatggagtacaaattggtgcagccactctgaaaatcagtgtagaaggtccctaaaagtctgaaaatagatctatcacctgtttcaccattgctttactgtaataaccagtaaacggaaatagcctagatgtccatccattaatgaataaataatgaaaatgtgacatatttacacaatggattactatttagctgctaagaaaaggaaaattatgaaattcacaggtaagtgaatgaaggtggatgctgagaccaattcctgaaagacaaacatcacatctatcacttgtggatctttgaagtttcagatacttgcattggatttgtaataaatacccatggaggtcaaattattgctaaggaacagtggtgatagtgtggggcttccaggaatggaagatagaaggtagtggtgcttaatgaattttttaatgagtgtctatacaaacattaggtactttgcacaatgtcaaccttctctcagaatttatcaagtagatgttcctgtaccacaaatagacaaccttagcttcaaaatgagcaagcaacatatgccaaaataaataatcagattttaactatcttgacacaggtaatttgttttacccatctttttgtgtttgctggctagcaaggataaggtgttgaataacctgatttttaaataaacacttggattaagagataaatgtcagtaatttagctagaaaaaaaaaagaagagagacctggaattccaaaccagactgtgatctgagaggctgtacccaccactctgttggcctcctctgggaagtgtgcagggctcctttccaaatgaggctccaatgcagggagtgcatatcaagggttgcaaagcatcttgctcagaaaggtgcatctactcttctgtttcaccagtggtttcacgaatctaggagaaatagccactgatttttctctctcagaactttaggtgtgacacataaagccatgtatttttgtttaatggtatgctttctatttgcacatcttcttgtgcctattaaaacaccgcaaatctctgcctgctgtttgcttatgctaaggcttcggccatcagatatgctacttcagcatgctatgtggcatgaagatccaagtttattcacaatataacaaagtagagtttgttttttcgtacagactgaagtttgtttcgttcaagaatgtgagttggtagttatggcttcacacccatgcagggtcagtaccattaaatgatcacattttctgtttatgttgacttctaattatttctcccattaaaaaaaaaatggaaaggttctgttagccaagccagagcacataatgattcccactgttggatgaacactgttggacctgtctcctgaaaaaaaaaaaaaacgctgttatttaccacccacaaactcatcaacagtcctggctctctgcaggatctggattctcagccctctccaacccctcttgtcctctgttcacctccattgggaacatggccacttggagaaagggaaccttcccctcccttagaaacagctgggaatgctgactcagtaccatacattttaacccagagcagagcgtgctcactttgtagtagagtttctatttgtggttaaggaaaagtcccttcacttttgatccttcagatgcctttgatacagtttcagcatcatactaaaccagcagatcagactggctgggcacaaggcaattaatatgattattcctactaatcacatagactttgaaatccacccatggattattaatcttttaatgaataaaataacatatggtggagattcttatgtaagtcttattagaattgaaagccacagtgttagtggcctgaattactagtcatttcaatttgcattactaatgggacgatttagaaaatgcaagaaaggactatatgtaagacttttattaagtttttattctttaatgacctcttgtatgtttcacaactttccttttctctttctctatcacaagccccagatatactccactaaaagaggaatgaatatttaaaagccccaagcaaattaaaattactgctggtgggagatagaagggaacagaggggaaatggaatgttcttatatttaaaaaaaaaaaaaaaaggagacatatacacaggctcttaaagggttggaatttaaatgcaaatccccaagtttgtgcctagttacatttcctctaatataaaaattaataaaagaacatattttcttgtccagatccataagattaagaaaatgaaagagatggcactatcagaccaaatgtttacaaatgtttacgaagtacagtctacatgcatttgatctgtgacatcagtcatttaaggcaggtctttggggtctgagcccaccctcttctgacacaccacctgtcagtcacagtgctggagcctcctaggttcctttcacgctgttccttgtagccagttcctactcactgctgtcatctctgcacttggtagacacttcctcggttgttcaaggatggtttccagggtttctccttaccatccaggcttcaaacaaagaataacttcaaaatgtctgatctcatcaccatgtttacagtagcacctctaagtgattctatgtgtattcacctgagaccaggacaatgtgtatttatctaactctctattatataactaccagcaggttaacatagtgacacaaagagctaaagaacctttacccatgtatcctctgtatcatacaacacaaggagttcttacttttctttaactaaaacattaatttatagcctttttgctgcatcgatgtataatgtttccattcatctccaagcttacttctaactagcaagtatttctatcttgatcctgctatcatggtgtaggggtgtaaaacagtgttgaggctggaaagataaattggtagttaagagaggccattcaaacatgacaaccagacttcagattccagagtcaatgaagatgctgagtggatgttgtatctgcctgcaattagaagaccagttctcaacaagtaggtggtgaccgtctgagggcactgaaggactctttcataggggtcacctaagaccatcagaaaacacaaatatttacattaggattcattaacagtagcaaaatcacagttatgaagtaacaaggaaaataattttatgcttgagcagtgggggtggaccacaacatgaggaactgtattaaagactagcagcattgggaaggttaagaaccactaccccggtgcccttgactgcagagacagaagatccctaatgacagctggccagtgaaaccaaatctgggaactccaaatttgattgagggatcctatctcattgaataaggtgaaagcaactaacatgagattccccataccaactgcaggtctccatatgtacacccccccccccaacacacacacacaaactcacaccacatacataaagaggaaaaatagcattgttatatttcattaaattactgtacatattaaaataagcttttgtgcctactttgacacctatgcttaattcctccaaattgtttaaaaggctgtaaagtttcaaccatggtcagatttaagctttgactaatgaatgagaatttaaaaattctcaatattttcttttgtgttcaccaaaaaatgtgtaagagactatccagtaattctattttttaacacttgatcttcaaggaactgtgaatcaatcatccctaaattttcagttaccataatgtcactgtataataacacaaggagacctgctgccacagtcttttggggacttgattgtgtagaaatacatttccttacttagtcaagattaaacaaaaaacttctagataaagagactactaaaagacatctagaaaaaccttttttgtttagctttctgttaaatatcagtttaacacttgcattaaaaaacacaattacacagcctttttatattatgggtgtcattcattcttcaatcatactgattattaaaaatcaatgcaataaatggtcactctgtatagatgccagaaattatcaaagagactaccaagaaattatcagaccaaataaactccttaaattgaggaacattaagtgtgaacaagtgcaaaaagggagagaaatctgaagtgaatatgaagtcttttctccttctcctttctctaaggcccctgccagggttagggctatgtttttgtttgcttgtttctttatttttttggctaaagtgatatttaccaaatttgtgaattcattacatattaattatataaattgtaaaattacaaaattgctcatatataatgagcacttacattgaatccaatcaagtctgttttatgaactcacaagtaaatgaggagagtagataattgacaaaacacaataggttactttcacatagtttaagtagatgagagttagacttccagttgaacattagaaatggaataaaggcagatccctgaagcttgctgtgaattttcacacaagagttcttcatactcagttgatttgatgcataataaacaccgcgagtcacaggctgaactttctcagctagatagtcagaaaacttggtcagatatcactcaagaacacttggcatcagacactggagacagtttttaaatgatgcattaatctactatttccacacagttttcataagattaccatcttataggataataggagggcttacagaggaaagggaagggagaaattttataattatattataatctcaaaaaattttaagttcaaaacaaaacaaaataaaataaaaaacgttttaaaatagttattacaatgtatctctttcttatttataacttaagtagtactaattttgcatgaatgtcaaaagatcccaatttgaattcctgtaaattgtttccattttctcactctcatctagccccctttatattagcatttacctccagagagagttagcaggaacaaagatatatatttcaatccctgatctcagctattctttgctccctaattttcagttttcttcacacctagcttagaaattaaaaaatgaatgatcatgataacatgtacttgtagaggaattttccactaattaattggttggctaataaagacaacaagaagccaatcgctgggtgaataggagaggtgggccttctgggtcagagagaggaagaaatggccattttttacagtgaggtaggaatgagaccaggaactgtttgacctggtggcgacctctgccaccggaagatttccaacatagaatagttgagtttaggataatagattccgtgcccagtggttgtgtcatctgttgattttaaattaagattgtttggtgttttccattcacgggtgactcgggtgggccagagggaaagagcatagcaggggcataattccgccaggctttggaacaggaagattcggctaaggactgaaaacgagcggagaggtaaccaaagcagagtgcaggctggtgacagcgttcccacagctgaccacagggttttggcctggcaagagagccatctcagagctctggagaggcagagccagcatttgtgggggaggaattggttaggagaaacatacagtcttggtctcaggctacgcactgggctaggaacagacagagaaacaatatttccaccaatgttggaaagccagatttagcgtggagtcattttgtaaaactacatgctatatatacttccataggttgctgaacagttgccatggtgaattctattattttatgagaaaatgtgaagtgtctcagaatgcttctccctttctacaccttaactagctaccaccagagaatcaatcccatgtacaccaacaaacactccaaagtaaactctgtttctggttatgtcatactgtaccacattttgataagcagactcccttttcctctcaaccttgttctaatccttcaccttcaagctctctccccctaagtagtaacttcttattctctcttcccactatcaagaactcaaactcccagccgggcagtggtggtacacgcctttaatcccagcacttgggaggcagaggcaggtgaatttctgagttcaaggccagcctggtctacagagtgagtcccaggacagccagggctacacagagaaaccctgtctcaaaaaaaaaacaaaaaacaaaacaaacaacaaacaaaaacaaaacaaaaaacaaacaaacaaaagaactcaaaatcccaacttcccaaatccctttcttgtccaagttattctgctggttaccatattcatttgattacagcaccttggtactgtgggaacatgcatccaacccttaccataccattcttagcttaatttgaagttactatgagcaccttacctagaatatcccatcaactatctcatgatcttcaggtctgctaaggtgttagggaaaaaccatttcaatagactgcaatacccggggatccatcccataatcagcctccaaatgctgacaccattgcatgcaccagcaagattttgctgaaaggaccctgatatagctgtctcttgtgaagctatgtcagggcctggcaaacacagaagtggatgctcacagtcagctattggatggaacacagggcccccaatggaggagctagagaaagtacctaaggaactaaaggggtctacaaccctataggtggaacaacaatatgaactaaccagtacccccagagctcgtgtctctagctgcatatgtagcagaagatggcctagttagttggccatcattgggaagagaggccccttggtctttcaaactttatatgcctcagtacaggggaacgccagggccaagaagtgggagtgggtgggtagaggagtggggggagggtctgggggacttttgggatagcactggaaatgtaaatgaagaaaatatacctaaaaaaagaaaagaaaagaaatcacaacatgtcatttaccatatagaaacctgtcttgtctacagaaatcttggcgtgtcatggtccacaaaaggtttcatactgtaaatgcaccttatgcctccagtcttcttgatagtctgatttgttcctgaaacatacacaaccttgtatcaagctcattccagtctacttgttaactggagcaattgtggtgttacctcttcctcctctagcctgacatcgtcatgtatgtgctgataaagtccaactacttctaaaacaaagtggaaagtcttctacgacacatccctttcctctttagtgtcacagtctacaatgtccatatacaatggcagtagaaagatattatttgacaaatataatatataagggaaaataaacttaatagaatggggcaaaagggcaggagcatgacaaactaaaattctatttttttttccttgtcttagactcacagggtttcatggctggaagagttcttacaggcaatctagaccaaagttttctgtggtttccatataaaaagtaaaaggccttaagatgaagtttgggaaatttgtatctagttgtgtaatactgactataatttcagtgatccttatacagcattcatgaaaccattcactacagtattgacccttaaaaacaggatgccagaatctgcacttcagaattgtaatgtctggcatttcccatggctatggccattgaatctttcccaaagaaacatatttgtgctcaaacattgctgcccatatcgtaaattctctgattacaaaccagtaaatctccaccaaaaagctgggacaactgaaccttccttgctcctccgaaaacttcgtgcataatgaaaatatgcaggaagacttgttattatcacaacttgacttgcatcagttcactggggaaaggcttagagtctcggggatttgagcaaggtcttagcatatcctaccatgtcacaggaagttgttgccaatcattagacaaactcagacctgactcagaagtttctgaacatccaaatccaatgctttaaatgaaacatcttaaggaatttgaggctctaaatgtgtaaaacacattaatattaataactaatctatttaaagtagcttcataattcataaaggcttgaggtatataaactttcaaaatcacattttccttaaaacacttaagtggtaaggacatatcagtttggacccttttcattgaacctggaatcactgcttgactgacttggaagccattagtttctcaagtatgatctatttttccatagatgggttttgtgaaaatctttcacaggtttcacttggacttcgagattctgacttcaattctgatggattctgaacacttgcggttctcctataccttttcttttgagggtatttccctgcttaaaataggttctcatttttcccaagcactcccccacccctagtcccctgtcataaaaaatgaccttccttggaaaggagtttctggtacaaatccctcaggtcccataatggcaaaccctcctcacccactttataggactgccccaccctacagaagaacatgcacaggaaaagcagccctcccttcccccacacatttcctcagtttatttatgaaacatcttggaatgagagcgagctgcttgtggttcctgtggcttattcagggatggtttcctgcaggccagggaagcgggtcaactgaatgacctctatggagctaactcctataccccaacaggaaggatctttgttatgggtatcatttcagactgtgcctggagggctttgttgttccaatgaagagcttaataaccaattatcactgtgattacagactaatattatacttgaaatatgaaataattcttcccggctcatgttttgaatacttgatccctagctagtaggtgataatatctgggggagagatggagcccttaggtgtggccttgctggaggagaaaaattattaatatgggacttttgaagtttatttcccagaccatggttctcctcctgttctctgcttcttggtgtggcatcgtaagactgcagggctttgtttctgcaataaagagcttaattatcagacatcattgcaaatacagattaatagtgtccatgtctactgatgtttatacctttctctgtcaataaaagatgtcagaaatatgccaagatacctttagatacctgtgtgtcaatgttggcttctcaacggaagatggttgacttcctagaaagtcctatacaggattagcttatattttaatacagaatccattgggaaagacgatacctttaaacacaggctacatgcagcatgctccttacttggttcagtcaggtaacacataatcaattcccataaccaagttaactgagaggagttccagtaaatgatgcctctagtctttgtttgcgtgtgttcagacttgtcccggagcactcttacatcatgcatttatgacttcggaagccaggagtgtgaggacagtgactcttccccatttacttgaatgagttaaattaatggggctgggggcacaaaaactctagggcttctctcccaaaaagccaaagtagtaaacacaaattcatataaacttactggtaagacttagatgcaaagttttacactgtatcaaatttaatggtgagaagaaatatttcagaaaagcactgggcagtggcagtatgctaatgtagtttccgaattagtttgatttggattaaagagtaaagtattctcttaggtcaaagttgaaatagatgttccagacccaaggtctttgttcaacatcttcactcaagtgcatgttattacacttgctgctgaagtcacagacatgcttatcgtctgtgacacacacaaaatcaagccaattttaccagtttcattgcaataaaaaaattaaaattaaaaaaataaaaaataataaaataaaacaggggttgagagatggctcagaggttaagaacactgtctgctcttccagagttcctgcgttcaattcacagcaactatgtagtgtgttaatccatctatactgcgatctaatgccctcttctgcattcaggtggctgctagagcattaatatacataaaataaataaacataccttaaaaaaccccacaaaattttcaaaccctattttcctgcatgctgattcagtaattctattttactgagatttttaaatgaatcatttgaatgaaatatattttgaatgttcaaaggtgcaaagatatgagatttcaaattaaatattacatatggttaaggaaaattctggacttaaaaaaaaagtaggaaaaataatcttatctcatttgcccactatcatcaagtcgaaaggtaattaaagtaaaatacacacagagagggaaatgtcattgaatcttatgtccacagtctaacctctctttttgtctctctgctttgcctctgcagtgcatcctaatgtcagtcaaggctgccaaggaggctgtgcaacgtgttcagattacaatggctgtttgtcatgtaagcccagactgttttttgttctggaaaggattggcatgaagcagataggagtgtgtctctcttcgtgtccaagtggatattacggaactcgatatccagatataaataaatgtacaagtaagtagccacacccctctatagttctcattttcacctcatcccgagagatgtctcctgatgaaaaaagctcctaagaaacctaaaatactcaaaaaaaaagtactagttacataatattaggaaaagacacacatagacttagccctcaggacaggaacattttcactactaacttagaaacatcactcaagttttgtttttgtttgtttgtttgtgttgggttaaacaacctaaatccaggaacaggattattcctaactggccctacagaaaatgactacaggtatcagaaccaatcgagttcccattacatataaatatccaagcattcagtaaccggaagaattatttcagctattttggcctctataagtttccagtatagcaatgaaaatatttgcaggttggaaatcaagtttatgaggactgtcatcctggcctcaaaattccagcctcagcaatggaaaccaagtggcatttgaaagattcaaatgaggaaatatcccttctctccaaatatcatgtgtccttccaccagtggctccttccctgcttccctgctgcctacctcagagtgtcccaggtcagaatctgtctggacaattttgttcctcactggctcttctggaacttctgaagctgcttgctctcccattcaagattctaaaggcatccctttctcagtgaggtagtgtaaggtccactcctccaaaagaactggcctcggccatttgtcagtcatctgtccgttctgtttttcctacatttatctgtgctattgtgattcttgtttcccagaacacttacaagtccaaagccaactgtcctttagctttcctgtgtgactgattgattcactgctagatttgagcctcagttacagcacttgtgaataagagtcattatagtgaccactgcattggtttaagctaacattttggtaacaatgttgcaaaatacccataacaatcatggttcatggtaattactacataggagtcagttgctgaaattgtttactctgtctcctactagaaggtgagctttgtgaacactgggcatcaaccccatgaatggggtcaactacagtttttgacatctagtagacagttaaatattgagtgaacaaataatccttgagaagagtataaatgaattatttcagtgtatgttattcaaataacacagcattactatcacttaatgcaaaatgctacttggacaaatggacaggttgagagcttcttatatgaaacaccaggaaacaggggtgattcagggggttttggatttgagaatggttgtgtagacattactggctaaatatccctaacctgaacacccaaaatctataacattttttttaacatgatgtcagtcaccaaagtgtctcagattttagaaactctgtatttaaatgctggcaatcaaggggccccagcatatgttacaaaggtatttgcgtgctacaatactataatttttaaaggatgcatatcaatgagatggctttgggggagccctcaattcagtctagcaaaataacactgaacactgaagttgatgccaaagttgcatgtacagtaggaagatgatccagcagtagtttggagaacatgacagagtgacaattatttttctgtatttttcctttcagaatgcaaagttgactgtgatacctgtttcaacaaaaatttctgcacaaagtgtaaaagtggattttacttacaccttggaaagtgccttgacagttgcccagaagggttagaagccaacaatcatactatggaatgtgtcagtattggtaaggaaggactctaagatttataatgggtgagaaacacatcagatgacaatggcaatcttccacaagatcctgagaggctatatctaataggccctatccatctttgtttataagatactattccaaacctatgttcacatagctatatcctgcatgtattgtgggtagtttaagagtgttctgctacttgttaaggatggctcataattgtttcgaactactctgatcatcaaatatttcagagaaacaaaggaaaagaggagggagagaaggaaggaaatgtgtgagtgggacaaacttagctgatttctactttaaaacaagacttaaaaaaaaaaaaaccctaaatttgataacaacccataatgaaattattttccatatggtggtattttttttaatattgcccaccaatgttgctgtgtctaagtattaaacacagagaagagagaaaattttggactccttcaaactgacagaatgagacagtccaaactttgattaattataggcctgttttctggagaggaggttcctcagacaagttgtctgtctaaacgacaaatcatggttgggctatgttttccctcttttaagtgttacacagctactagagctatgggtttgatgcagttgtggaacagaggctaacccaaatgggaaaacagaaaaagagaactccaagtcccttgggcagtggctgcagaaacctttgatgctgtcctatgctggtgtgtgtacacagagcctcctgattcaatacaagatagtttccaggagtgccccaggctcccacagtgtgcttctgttataatttaaggtgttggacaaataatttaagttggtggctccaccatttcaggataaatgcaacttttatgtctatacattcttttttggcagaaggaaaaccataggtgatatttaaaagttagccgcagaaatgctgggaaccagtaatctcaaatttatcttgactctttttgtttcaaacttccctaatcatgaaaaacacagaaaaacaacttaggaaaggggtaaagttgtccatgaaagttcttctggtctaatcatccaaagggctgatgattcgagataataagttccaaacagtggacaaaatgggaaacactccactgaaatattaaagtgcagataccagaaacttgtaggatttctttactgaggagaaaggacagatatttaagttttgttagttgttaaaggtgtaacattcggtctttaaaagctaaatgctctttaatagtttcttatcacagagtgtttaacatttggcactgtgggataagtcttcaaagaaaattgggttttatatccccaaagttaccaattctatttcttaccataaattttaaatgatgattaaacaattaaaatatcactagctgcccaatggccatttattgaacaaatgacctaggacacagttgtattgtagatgggcaatttcatcaggactggctcctttagcctgttccctaagggaagtacctatcttggtagtcagtccttatgcatagcatgtgctggcttgccccagactatcagggaaaataatggcacgcttcactacacaaaggacaatcaaagtatggaggttcaggacccagaaagctgagatgtggagcgcaaaacacacgataaattccagtgcttagcttaggaccttatttagagctcttcactgcttaccagtagtgtatctttcccctgcccagggctgttagttaagttttgtttctacttagaagataaactgagtaaatagatttcaaacaaaaaactattgcccatgtatagaggtggcatgaaagatcattgtaacaatgtatccagtcctcatggtttgcaaatcaatttagcctacatttctacctttataagacggcatattgtttccactctggatttgagatatttgcttccccctgcagtgtagttctgtgttcctcattgttcctcttggaagtcacagagggggtcaatatatcactgtaaacacagagactgggagctcataacctagctatatctcctattggacatgcctccagtggctgaacccaagttcacccattcccacctctcacccccccacacacacacacccacacttttactgtgaatttcactacatctcagatgacaatgaatcacagactgactctttctagggtctagggctcattaatttttctcaaatacttagttcattgggcagaagaaggaaggaaggaaggaaggaaggaaggaaggaaggaaggaaggaaggaaggaaggaaggaaggaaggaagacagcatctgaggttaagatccttcttaagcatttttaacaaagttatatcccagttttaaattgttcatgtaattgaaacttaaattgaacttaaaccactcttttagttatatctatcatttttctaacctttccattttatgaaagtattatatttgctacattatcagccttttaaggtatttctgaaggaaaaaatatcttcctttaatatgggttttaactatctaatctcattagttatatttttttccttcaatagaattatctaagattaaatcagaatttcatcttaataaccaatcattttctgatttttagatcagtaactacctatgtttcaatttttcaattctggtttcataaagtgaaagtatgtatttgattttatcacctttgttgtgaaagaccaacaatattttggcttccaaattaaataatgctttcttttctaatttgtcctcttaattgtagtgataaatacagacacaaagttaacatacagactaatatttctctttctatttgccttcttggaggctttttcatctatattactatttgatgattaacttggagaaagggtgttaggaggtaaggttcataaaaggcaaaatgttatactattaaatagtgtacttgctttatttgctgaccgaatcacaatggtatagctaaaggtggagtttattttgaagatgattcaatagagctcatttaagtttactgaaacaaattcatttttatatgactctgtgctgcacttgggtgcctgcaagtgataaaaatgcctataaaaatgaaggacattttaatcctctagatttaaaataaaaatattaattaaaaattactttcttatatctagaggtttaattttaagtctctagatcacttaggttattgttcttaaggttgtcatcagaggtagccttcttgtacaataacaccccactaagttagaagacactgcaagaggttaccagaaacatgtttctgtggagacaagctgtactatctgaaaggtttacaattggaagccatttctattgttgtaagttatggtgtttcatggtcataaaaacaggaacagcattttaaaaaccagccaggagagcacagccctgtactactagaaatcaggagacatagacatgaggatcatgagtttgactctaggctggactgcataaagacacattgttggaaggagggaaggaaggaaggaaggaaagaaggaaggaagggagggagggagggagggaggcatgaaaagttgacttaacttttttaaatgccatagagctagttaaaagtccatttgacgtttaaaaacagatgtatcatctcttttacctctgctagaaatgaatatattactatagtcaaaagaatactctggaacaaagatcaaacaatttaacaaaacttttctcaaaggatggaaataccctgagtgaaaggatattgctaatattttatacattcaattttttnnnnnnnnnnnnnnnnnnnnaaaatagcacttttggaatgtcattaaaagtacaaacatctgctacaaaaacccaggaaaagtattaatgaaaagcagagaaactaaactcacacagaggaaacaaatcttcacaacagcttcagaagggcacaccctgccctttaagcaccacgcaaggacatccagaccaaacgcaagttattagctgtcactgaccagaagttcactaaagttagagatgctgctgtgaattaactgagtaataaataacgtttaggtattccgcagcatgggaaacagaaagggcactgactctaggacaaggacctggatagtcctttctgcctgccatcctctagcacagatgctctcaaaccaaatgatgttaccaagtctgcacataacatctctgcattaaggcggcacatctgctccaagctagaaatgtcatcagaaggctagggtggggtccagaatcctgtgctttatcaggcccttcaattaattctgagatctgcaaacatttaattatctagtcaacaatccctcgagctctagtaagaatcactcacttcttacagcagtgttaggaaatttccaaaacgttcattaggtgtgcctgagttaaccaggttcaccgcagaattccaatccagtgagaagaaactgtcccaacagcatatgcactaaaaagcgttctatgtctgccccttatttatgttatcttgcccaactatgataagcagaagctattctagaaacatagatgtgttgaagggatatgttgtggttgtttgtttgtttgcttgtttcactgataatcctgcctgtgctttggttgcagtacactgtgaggccagtgaatggagtccatggagtccatgtatgaagaaaggaaaaacatgtggcttcaaaagggggactgaaacacgggtccgagatatactacagcatccttcagccaagggtaacctgtgccccccaaccagcgagacaagaacttgtatagtacaaagaaagaagtgttcaaagggagagcgaggtacagactcactaacacaacatgcttctttgaatcctcccaatctgatccatatttcactttatatcttatggaatagttggccatatttctaatgccagaagctctaaaatgggtaggaaaagaacactatggacctaagttacagtttatagatctgatatgggttttttctttttagtaaggaacctgacctcagctctttagtgtgatagtgtgataaatgaagcccaaatcaagagactactataagtttttaggcttgattttattttatttttttttgtctgtgatctgccttgttaatgcccaggaacttttgggaagtttcataaacacaaggtgaacatcatctgttgtgagaccataacaaagggacatacccctaccacaggagacattctctacacaattgcttacaaattaaaatggtgcaaatgtttctaagtttcacggtttgaagtaaagggtcaagaccactggggacattatgtctccatgttgctgttctaggcttttgtaacaggttgcataaactattagagcaatattatttatttcaacatttgttaaaatcctgtaagcaccaaggagaaacttaccactgaagatagtgcatgaggtgaaataaatttcatgtagaactacagttgctgatttttaaatgatcatccccatatttcttaatcatgtcctcagtaccactgcctacaaatatgttgtatatctttaactaattatagataattttctagtgagcctatgaatggccgtctccacaagctaattgtcatttgacaggagttgaatacatctgcagatgaacttccttcgcttatgtcagttagtctttcactaattcattcattcaacctacttttattaaactcttacttctgtggccacatatcatgtgaattcctaaagattcatagctaagtagaatcctctctgagagtactatgaagttaaacccagagtccaaagggaagctgagatgtttgaacagatgttcataaacaataccacgtagtaaagtagtttcttagaatcacagaagaggacacgctaaacatgaacattgtttatagaaaaagtaattttgatcacctgagtttttacaaaatattttttatcatatcaatagaattaattgcccaccatgagactgtatggaatcttccattaccactgaaactcagaactagggtactaaaatttttggaaatatgagttatattaaagagaatatctaacttttgtaaatctgtaagaagttttggttaaaacttcgtttcagaaatgcaagttggctagtgaaaacggtctttttagcatttgttatcaattaatttaaaagtcttagattttgaaagttggcattggaagtcaactgcttgagtactctattggtatgctcccatagccacagagttatttctgtttactaaagatcttgaaatttaatgagctacatctggccttcaccatgtttgtttctataaaatctacagcattaacttgtattaagtatattttccttcaagaatataaatgaaatgaagcttattccataaactaaattatattatattttctcttttatttgagaatatgcccttataatatacttctcactgcacttgccataaaattgatgtcataaatgccacttcttaggactagcagctagaagagaagttatgccataaagttgtttgagtatcaacctgtatctgaagtgtgaactgaaatttttgtttctgatctttgttcctcccttccaaggataccacatcattttacattcacaaaattagatttgtggaaatataacagtataaatgttttataatttctcaaatttgataatacatgtactagcaggaattgttgatttcctggaataacattccttgccccactccacttttccttactcttcatttttctgtcaatgagcctgtttcattttttaaggtaggttggaaatataaggaagaaatagaatcatgctcctaattcatcactccttaagacttttcataaattcttttaatgtctacttattgaatatattaccttaacaggggttgggggagggactgtgtgagagagggaccaggataggggacagcaattggaatataaagtggataaataagttaagttaaacagtaagaagtcaaagaaacatatagctatgacctgtgtctgtgctttccataaactatacagggcatgggaacattacccaacttttcacttagccttagatacacagctataaaatacgtgtggtataccataaagtactttgaaatgtaaatgctaagaagaatcaacacacttagaaaggctaccaacaggctaagttgactagaagacataggagttagtatatctagattagctagtcattttttatctcagaatcataaacataagaaaccttcaggcagtttaagagataagaactataaaatgataagcacaagatctatccaccagcatatctatttactgcctaattgctctgatgtcagggcttagagatgtgtaaaacaggaagagtcccttaattgtataccttcaccactgaaagatgggtgaagcaaatggcctagtgatttttaaatgcatcttcaaatcttgatttgaaactacgtctgtgattttcctgggaggatcacagtggacagaagtaggacactcgtgtttggaacaggtgcaggacttgctttcaggatttttttcctgctgagttctaactgccaaaggcggaagctccagggaagaacgatagtccctgacgttcccctacatcgagccttgggctgattggttagaacgtcttggcagtgagcttctggaaactgcttgtctctcccactcaaaccaggatactaaaactcatgctgttgttccatactattacaggggtgctagagatatgaatccgggattggtagttatgtggcagacttcatcagctggtacatctctttactgccttcttaaatgtgtttaaaatagcacccactgctatgttatgtgagggagtgctaactgtactacaaatattcctcagcccctaatcaatgatcttgcccttgtttagatactatgagagatgtttctataaatttacactgcataacaagtaacttcaaaaccgagggtaaaacaacagccatccgtttaaggatctgtgactgggtagtttatacagagatccattcagcaagtctgatcttagctgggctccttcatgtgtctcacccatgttccttcaggatggctgagaactgaggctaatgggctgtgttcaaagtcaagaaggtacatcaagtccaagagagaaaggcaaagtaggtttacctgaggagatacttagaactggcaagcttatccacacccttcttttatcttgtactagtcacaaggtcatttctgactctgaaggtgagaaataagttgtacccattgcctcaggcaaccatgttactttctatggtgccacccaagcacagtcagaaggggaggaaggtgagtgttattgccatgcagagatctttttattgtttgccgtttgatgaatatggtcacttagtctttaccaatctctccttgtggtgctgtctcttcctctataaagcacagtacagtgtggcaagtagttttgtctactttgctttgtgctcccggtgagttgcagacacatacctgcccaagagctagctcagccacagatcacacacacacatacattcactcatttttaaactgccttattggctctgtggctgggctttcctaagccttctgcggctagcatgcccttacctttttcctagctcaacatctttaactctgctctcaacttaacggcccagttatcttctatgaagtccattggccttgctgcccaagacaccatgcccttccatgggtctttttccatttccacctacattttggaagatctaccctacagttctgagtctgttcctactctctctctctctcaagtatctcatctcctcttcctgcccattcctgctggaacctggaagtcctgcctcttgctttccaccattggccactggcgtctttattgatagatcaaaaaccatttgggggcaaggaccttcagtgtcagtaaacactgattcccaattaaatggaagcatcagaaccactcctctttagtagagatatggagtatgtaacttctattgcaccttccatgtataaaatgaagtgtattatgttcccattgcttccaaaactggcaaaactacttaaagaacttttgctgacagtttgatatcaaaactctggcagagagagagaaaggcaaagtaggtttacagagagagagagagagagagagagagagagagagagttgaatactcatctctctctctcctttttatttagtctaagaccgtaccccatagaatggtcttgctctcacttagcctgcctcttcttacatcaactaatctaatatagaaactttctcatagatatgcctagaggtttgtgtcaatggtgtgattctaaattacaccaagttgaaagtaagagttattcatcacaaggagactacaacaaaagattaaaagccaagccaaggagcttgggagatagctcagccattaaaagcacttactgcttttgcatatgacacagttttgatccctagcacccacaggctgacttacaaccatccataactgcagccctcattgatttgacaccctcttctgacctctacaggcaccacacacacatgtggtacacatacatacatggatgcaaacaacccattagtgtacaatcatgaagtaagtaatatttgtttgtaaaaagctagaccaagataaactcatgtattacaactggatggaacacagggccccaaaggaggagctagagaaagtaccgaaggagctgaaggcatctgctaccctataggaaggacaacaatatgaactaacaagtagccccagagctcctgtctctagttgcatatgtagcagaagatggcctaatcagccatcattgggaagagaagccccttggtcttgcaaactttatatgccctagtacaggggaacgccagggccaagaagtgggagtgagtgggtaggagagcagggaggggggaaggtatagggaactttcgggatagcatttgaaatgtaaatgaaggaaacacctaataaagaattggaaaaaatatttacttaaatatctctttgtaataggtgttctaatgtttgagaaattaaaaaaaaagatgccccctttaccagttttttcatattcttggcattaatgtcatacttaatgttcctgaaaattgtgatcaccctcttcagctttcttgtagcaaaaacctatgttgagggttttcattttcataataagaacactagtagctgcagttttcattaaagtttactaacttacttacaaaagcatctactttttctggcaaaatataaaatagaactgcctatattttgttctagcttcaaggcaaatatatggtatttttcctgtgaccaccatatcaatacactgatacatattcttcaaatggctgagtagggttaaaggtacagcttgtggctgtggaacagagtttgaattaatagagcctttggagaaatgacctcaagacctttggcttcactcatagcctgctctggccaactacgattcctgccaactagtagggttccctagagagagactccaagagcatcagcataaatctaaattctgaacccccaaatatagtttccaaaaaggtctttcttgttctttgctaattacaaaataaacaattctcagcaaaaagacacttccttctttcatggtactgtctagctccctgcacccctaccactctttaaaactgctgctgttgctgaggccctttggcacaggagacaaacccatgtttgcagacacaaaaaggatttttaagtctccctctttaccccagcaacttcatagaagccttacagagaaactctgtgtatgcctgtgtctgacagaatggatgacacaccttcttaagcctcccaagaggtgggagggggcagatctaactagaaacagttgatctctgtagcatcattaaagaaaaatactctcaatcttggttatatcatgcatctgtatgagccggttaccagattgaaaaattttacaccagtattcattgggacataggcgctaaaaataacagatctaggggctaaagagatggttcagtggttaagggcattgtctgctcttcaagacagaattagacccttcctgagtttatttccaagccactatatggtgtctcacaaccatctataccgggatctcatgtgctcttctggcatgcaggtatacatgcagatagagtactcttacataaaataaatgaatctttttattttatacaaaaaaaaaaaatgacagttctaaaattatcttaaggggaaaaaaaagctttcagcataggattttttaaattgcattctttcttcattgtttcaattcatcttctgtctcttttcctatttactggtttgttttccattgctgtgaatctttctaaaatttagaagaaatttggctctaaacagattcagtccagggtccatatgtaaatgtcccaatttaccctaatttccctgtccacgtggcttatttcatggaggaatttagttgatcggtttgaatcacatgtccattccttgaagtaatcactccagcaggtatttacaatattttgatttttctacctttcattggtcacattcctacaattaaaactgaatgccattgtgaattgtttgacttacaaataaggatgtacgtgtaattgatccagctcaatacatgcatacacaaatatcaagtgctcaaaaattattcaatgtaaaaacatattctttcaccagatactttccagccaatatgtataaaagcaatttaaataatgaagcctaagagcctaagcaagttttttttttttttgtaattttgacccgatgtgcatgtctagcataatgctaataatatcttcatttaaccaatttttccagtttctgggtttttaggaacatttttatgggattaaactgactttaactgaatccactactccttgaatggtttctgggacagatttgcatataccatgcaaggacagtcattcccatttctagctgcttaaggttctgtgtggaacacaccagtgtgggtgatgacattctgcttaattactcaccatgccactggaactttaagatgaactcaaacttaattactgaactcctgtgtttatgctatacatataccactgagccataactttagcctctatgaggccaggctgctaaatctggaaaatatgtcttatggggagttgttttgtttgtttgttgtttctgttagaggagtctcttttcccccctgcatttagaaagaattggataatcagaagagttgctcaacaaagagtaattatagtccatgagtaaggacagatatgtacatgaacacatgaggggtggttttacttttgcaacaagagcaattggatatttgcaagcacatttatttcttactgtggcataatatctgaattcaggagagacgataatacactaaattcatacttgagccatatgtgtgtgtgtgtgtgtgtgtgtgtgtgtgtgagagagagagagagagagagagagatagagagagagagagagagagcatgcacacatgtgtgcacatacaattgttcatttcaaaagtaaagcaggatataggaagtgtgcctttagtgacatggttagtgggtaaagggtcttgccaggaaggctaatgatatgagctggatcctggggacccacacagtagagggacagaaccaagctatatagactgtccttagactctgcatcacacacacattcacacacacacacatacacacactaaataaaatgtaatgattaaagatatcacacacaattaaaacacaaaagcattaccctaattaacataaacaatcacctagttttccataatataatcattataattaatagataactatttttatgaaatgcccacatatacagagaaatatccctcagggtaatgaatatactttgtaagtgtcagatacattgtctagttgttctctgatttatatcacatactgaggacttatgcttcaatttctttccctcgaaattacaacttagtttactaaagtagttcaatagcagagccctagtagatgaaacatttgtccagcttctcaagtcctattctgaaatgtgtaagaaaaggaagtttatatctatctaaaatattttagtgtgcgtgtgtgtgtgtgagggggttgtggtgtgatgtgtgtatgtgactatcggtgtgactctcagaggtccacgttcagcagtcagttctccatttcctctaagttccagggattgactgaggttgacaggctcaccaggcaagcacttgaacctaagtcttctcaccagctaaagagtcttccttctacttacctgttctacccttttccagctaaagagtcttcattctacttacctgttctacccttttccagctacttccaaccctggggtaacctttttatgttgctcctcttgtcttattttcctacccatgcgtatttacctagttaactaatagacacatatatgaacctaattaattaattatctaattaattaattaatatatacatatatcctgagacaggaccttcccacattcatgtgtaaatgacaaaggtcaatgccagcatgaccctgaattcacagtctgttttttctcttcttccaaaggctgggttacaaatatgcatcactacatccagctgttgcaattttttccttttattaaacatggctttttttcatacataatatatcctaattagtttcccctccctctactcttcacaattcaccacccaccctccttcccatgcagatctactcactttctgtctctcattaacaaacaagtaggcttctaaataatttaataaatacaatactataatatataacaatattaaagtaacacattggaatagggcaagataaacaaacagaaagaaaagagcacaatacaaggtacagaaaacagatacagaagtgaagaccaactcatttgcaaactcagggatcccataaaaacactacactgtaagtcacaatgtatacacagggagtctgtagagtaaaaatagagaaaaacataaatatgttaaaatataagataataaaaaaaactctggcatataaggaatctttttttttaatattttatttatttattaatttattaatttatttgtttatttattaaatgtaaatacactgtggctgtcttcagaaactccagaagagagcatcagattttgtcacggatggttgtgtgcagggggctggtgagatggctcagcggttaagagcgccgactgctcttccaaaggtactgagttcaagtcccagtcaaccacatggtggcatataaggaatcttaaaggactccactgagtttgttttctgtggtcattttctggtaggcatgttacctacttctaaaagtagtttgtttcttccttggagaagactaaattttcatttactagtggttatcaatgggagattgcttcttggttaggcgtggggtcatgtgtccgcttctcctttcagctctagcacttcacagttacttgagccctaggggagggatttaatggaggtatcctacttagggctcagtattccatattgtctggctgtgggtctttgtatttgttcctaactgttgcaggaggaaacttctctgataatggctgaggaaagcactgacctatgagtgtagtaaagtgtaattaggattcattttactgctatgtgctttagtagcatagtcatatttggttttaccctcgttccctgggctatctattcataagttcttggtcatctaagcagtaccttgtattagttccatatcatggagtatgcttaaaatcagatattggttggatactcccataaggactgtgccaccattgcagcagcaaatcttgcagacaggataccactgtagatcaaagggtttataggtgggttggtgtttacctttctcctcagtagtgtgcagagtttcttctatacattaacatatagtagtaaaatctctatatagacaccagcttgacttcatcatgttcaatgtgttgtgtaggtgttgtcttcaaaaatgggcctttgctgtcagtttgtggagagcaatctgtaggtttgataacaggcaaaggtgtttgggttcccatgggatccctttgacctataattcagttagatgtgatccattcccagtgctgaaagcttctttttgtgacaaaaaaaaaatgtccacttggggttgtgtctcccatattatttggctatttcatttagaccacaattctatattatatattttagaaagcttctactactatctctgaaaggcccttaatttagctatcttacccaatattcctacctccttccctctcctctgcctgacccgatttgatcctcccccattcattccaattatagattctatttccctttcctggggagatctatctgtctctcctccctaaccccttactctatagctaagtctgtgattctaggaattatagcttgacttaatattgactgaagagctaatatccacataaaaatcttctcttttaaatggactgtttattcacatgttcagaacctcaagataacatctcgtattccattcatttcagtaaaagtacagaactatttatggtcataactgtgtcagttcaaccacaagtctgccatgagtgttatttgcttcacttttcaatttttgctaaagcatttcattgccaaaaattatatatctgctgttgtaaaagctcaaaaaaattgaatgtataaaatattagcaatatcctttcactcagggtatttccatcctctgagaaaagttttgttaaattgtttgatctttgttccagagtattcttttgactatagtaatatattcatttctagcagaggtaaaagagatgatacatctgtttttaaacgtcaaatggacttttaactagctctatggcatttaaaaaagttaagtcaactttttatgtctgattttcatcatttagattataacaccagaacatcaaaataaagatttaccagagtgtttaaaattatacttctacctgagatgtaataatcatttcgtaagaaccaagcactggatgaataaagcaaaaaaaaaaaaaaaaagcatatatttgtatatgggaagcccagtacataatgtgggttaatggtgaaatgagttattagcaagattggaacttgtatgcactgcccatagggatgcaagataatcgaacctgcctggcagttccacagaaatccaaactgaaattataatgtgacccagcaatcccaattctgagcgtatgtactaaaattagattctccttgggtactttctctagctccttctttggggaccttgtgccctgtccaatggatgattgtgagtacccacttctgtatttgccaggcactggcagagcctcacaggaaacagctatatcaggctcctgtcaataagctcttgttggcatctgccatagtgtctgggtttggtggttgtttatgggatggatcctcaattttgaagccccataggaggaacatcaatatgaataaccagtaccctcagagctccttaaaccacacacacacacacacacaaaaacaaacaaacaaacaaacaaaccagggggactcatgtctctagctgcataagtagcagaggatggcctagttggtcatcagtgagaggagaggcccttgatcctgtgaaggttctatgccccagtataggggaatgccaggaccaggaatgagagtgggtgggttggggagcagggggaaggggaatgggataggagattttcagaggggaaactacggaaggggataacatttgaaatgtcaataaagaaaatatctaataaaaaatttaaaaagtagattctcaaggagacattcatatgtccatgttaataaaactattattttcaatagccaaaagctgtatgcagttcttatgaccattaatgaaaaactcaattaatagaatggcactcagtcgcacatcattgcttgaaaaaggaaaaacattctcatacatgctaaaacatggataaaactgaagatactatgctaactaaaatcagtcagtcacaatattacaaatatccaattgttgtgttgatatgagctacaaatttgcaaaaatcacagagagagacattagacagtgagatgcaagggtccggggtggggatggggggagaaaatgaagttgttgagacatagtttcaattatgcacaatgaagagttctccaaactgacatttgtgatgacttcacaatgcgaatattcttagtgacactaaactctatggttaaggtgtctaggatctttatgtataatttatctcaacttaaagaataaatgctaagggttggaagatgactcagtaggtaaaggattgcaatcatggtaatgtgagttctatgcctggaacccacaaaaggtggaaggattgaactgagtccaccaacttctaatctccacaaatgtgcaatggtacacgcaacccccatgcacacatgaatgcatcatgtacatacatgtgcaccattatagtgaagaaatatttactgttaaaatagtgtttctataaggaatgagttctagctagccaacagctatgggccagactgctatattttagaaccattgaacatgttttctgagcatctttgatgttctcacttaccttcatggtaaaatccgaatttgacatttctcttggttctttgctatagaaaggagtaatgttttcccccttagggaaaatgcttgaatcttaaaagagtaaataatgtcagtgggtttcccatggacaatgcaatgtattccagatgagatcctagactctactgtgctatagctacgaggagttatcagtaatgcaacagtcaaagctgtcctgacaggtagcttccttgtggtatgctgttctgggccttgcatttatttgtttcttgggttttctctcttgtttgtattcccttgcacaaacttaaggtcatggtcctcccatttattctgcaatgcaggaaaactagagaaaattgaggtaaaatttgcaatagggccacccagatctgttggaaacatgagcataccttgaggtagtgtttaacatacagcctcattttgttctgcacatctcctgctgttaatctcctggcctcatgctttcttctgagtttttgtcatttgttccatcttccctgattgctaaatacataatgtaaaacattaggttgcaaactggccttaaattggctgagacctcaggagaactattccgaacactttttatataaactctaaggaggtcaaacttagacaactctcagctgctgagcttggattccacaagccactgtccagttataattaatattaataaatggcagatgacagatgtttattgcctaactgagctatgtgtatccaatactaagtcttcaaaaagccagtgtcaaaggatctaaacatatgtgttaaagtaccaaagagaataaaactacagacatgtgagccaaactcttctaactgcaagttcctaaatctccataggaaacatatcagacacttctctattacatattacaaaatggattgacatgagactgtacttcattagattaaaagtcagttttataagcctacatttctagggaaaaaaagacttataaaccatagacaagcatttatttaaaaaaaacaatatacataactgttgactttaaagtctgaagccaacatgtataatgtacatggtttttgtgatgagaaagaaaatcagtattccaatgctaagtgggtttaaatttgtacagctctgtcaaattctgctaaataatagactacataataaaaccattgactggggtttattcgcttctgaatactaaagagttatgactcagtaattcagttacctggttgtgtaatcctgagagcatagtaagatacttataatagaaatgaatcctccaattactaaaggcaaagtaaaagaattttccaagggaatgacatgaagactcaaaaacatcttataaaaaaacagagaggaaaataacttgattactttatttctgtattcattggaatccatacagtatgaccatatgcattaacacagattcttcccaatggagctgggattgaataacacgattgactggatttttgacagttttacatgattgtcttatgtagttcttaagtaccctaggcttgtatgcattttatttaaaactctaacttaaaggtgagcaaattgagacattgggtgagaagttggctgaacaatattaagtaatttgcttatacagtagtaatgttctgcccccagaaggacttcaagtatcagagacagaaaagtgtatgtataaactactatgaccagcagctaatggttggggcagaattgtgcccagagtctgggtctttttgagaataagctttgtcctagctgctataacacttttgctccatgttcagaatgaagatgtatttcttttgtttctgcacctccattcatacccctaatcaaagggttagcaacaatgattattttcttgatatccttgatatgttgctgatacaatctaaaacatcctgtttctcccacgaaatttgaaaactgtgaacatcatattgaggtggtataagcatctatgttcacatatcacgctgtctaaacaaaagcattgtcaacagagtcaggcaccacgttccttgtgcactttttacagggctgtgtttaactatgggtcttaataagaaccttcatgaagttttccaaaggataaaaatgctaatgccacatctaattactattatataacactaaagacacaaactaaaactgattgtattcaagaagttggattttctgctcaagttgtaaagtatatatgggctccacatgtagtctatgaatgagaggttatgctggacacacagagcacagtacctgccccagggggtttctcagtgtgaagcaagctgcaagagagtagggctctaagaaagaacaacttgtgcaatgtgcaactgagcagatgcagcgtggctttcagggttgttctctgaaacttgggatgatgtggaaaaaaattctatgctgctcttgttgctgtagacatctgctgaaggcatgtggggatggtgtaaattttctcataggatattgtatctcaaaactagaaagaaggaaaagtggtaaggaactgagcaagaatctcattctaacaggattacattacaggatgcttactccaggttgcaagtggtaggtattccatgaactgtgttaaaaaaaaaaaaaaaaaaaaacaaagcaaaatacaacagaaaacccacgttgttttctctacaagtactatatgatagctatttatagcctttaccccacgtaatcaaagactagcccctttcaaatggcatgccggattattgttcctttcattaacgaaggcacaatatattaaagaagcattgaaatacatttttagacatgaaattaagttcataaaataggcttaatttcaaattagtcaaaacacatggatacaactttatttttatctgttgtggttttctgaaatattctccatctgatgcaaagagaagttccttgatgttccctacagaaacgcatatcaattgcttattcaatagcaactggtcatccctggaaacatatacacacaagtaaaattgtatagactaagcaggttgtgtttatgtacacacacacacacaaacacacacacacacaaacaacaacaacaactcaaagggaccatgaattggaaaactagacggggaaggaatacatttggaggtttatgagagaatgggcatgagaagtagaggtactgtggctatggtgaaacatcatgaccaaagcaactcagggacgaaagggcttattgggctaatgttgccatatcaccattcatcatcaaaaatgttaaaacagggaactgatacaggacagaaacctggaggctagagcttatgtagaagccatcaagtgatgttccttactggcttgctccccatagcttactcagcctgcttccttatggaacccagaaccaccagcccaaggataacaccacccacaaagggctgggccctcccctgtcaatcactaattaagaaaattccctatagatttgcctgcagtcgggtcttatggaggcattttctcaactgaggtttcctcctctcagatgactctagcttggacaaactgacataaaactgacatagccagcactgacataattatactataatcttaaattcttaaaactaaaaatggatctatttcctataatcatatacagatcgttaagaattaagatgtcattgaacacctaccagttgtctataaagccatataaactatttgaaatacaattagaccgtttgcaaatccaaggttgtcctcatgggatcacatctgtgtagtgttatgagcatatcagtttcatctatgaatagcagtggttagtgtatgctttcatgagacagttgaaggtgcaaagatagcaaaagaaacatgggttatttttagaatatcagagtcataaacacatgcaaaaagtgcctctacactatatttgatattgctggcattttcctattggaaaaagacaacatttcccattgacctcactagaaagtaatatctatagatgacaaacacttttagcaaagtatcaggatacaaaattacaaacaaaaatcagtaatctacctatatacaaatgacaaatgagttgagaaagaaattggggaaataataatacatttcataataatttcagaaaatatcttggaatgattctaaccaagcaagtgaaagacttaaataataaaaactttaagacattgaagaaaataatttaagaggatatcataaggtggaaaaatctcatacctattggtcagtaggattaatatactgaaaatggtcattgttctaagagtactctacatttcaaagcaatccccatcaaaattccaacacaactcttcacagaaattgaaaggacaattatcatcttcaaatagaagcacagcattgatcaatggaatcaaaatgaagtcacagaagtaaatccatatacctatggatgcctgctttttacaaacaagtcagaaacacacactggaaatagataatgtcttcaacaaatggtgctggccaaactgggtggctgcatatagaacaattcaaatatatccatatttatcactcaaccccaaattcaactccaaatatatcaaggacttcaacataaggccagatactttgaatctgatggaagagaaaattgggaatagaactctttggcccaggaaaagattttctgagtgggacactgatagcacagacactaaggtcaataatcagcaaatgggatcacatgaaattaaaaagcttccaaaatcattcaaacaagctgcaggctacagaataggaaatgtggttttccctgtttctcagtataaatttgtgagtactgtacagctacttaaggtaattaaaagtagtctgcatgaagccacagaatcagcagcgtgctcatcagcacaccaaactgctcaatgcttacctcactgctcccaacattcgagcatgtgtgtgttcatttcagaattttccctaggtctgccattttgtctgtgttatctctgttttgcccatttgtattgtttagttcaatttttctgaacttgaaaatagtgattgtttacagaagatcaaggtccaagctcattatattttgggggagtttaaggattaattagttttcagtttgggtgtgttcgttacttttcttgtggttacaacaaagtactcagaaaaagtcacttaaggaaggaaagcttaggctcagaccttgaagacatcatcattcatagtggggaatacactaataattgtagctctggtaaattctttaagattcttttaacaaatttctactatgtttaaatagaaacacatcaaattgaataagaaaattgttcatcaaaatccctgtaagattattcttattttcttataaaacatactttgtcatttagaaatgatggttgttttagaggattcacaaagtccctgtctgaaagagtgtgctgtggatactatgttatgttaaacagatccaggcatagagacaaaaccaatattccacaaatgtttttgcaattctgaagctaccaatatagaggtttgtgaacccactctcaccttaacattgtcttcagcatttcatatctaattgtagtatagtattcactaatataataaatatagatttatgagatattttaatgttcttaaagcaagtgaaaaccacccaagaggagcctcaccaatccaacctgaggttgtccagattgcactggctgaaattaagtagaagatcattcatctcccagggttatgtaagcaatcttagagtgggagttcaggcgatgattaagcagaaaagaaagccagcatgcaagcccataacaagaggggcctggcctccaacatcaaggagctatttccttttttttttcctcctcctgaataaacctaaaatactccttattgttgctttttggtattctaaaatctcacatgtttagtgaagctattttttaattactaaaattactataaatgtggtcaaacaaatacaaaataaatgcaggtaaaagagctcagtggtttttttttagcatctaggaagaaaacatgcctccttgtctaggtgtcatgagaaaaaagcttagggtgaatttaggataatagtgaataaagttaaagctcaaaagatgttttgagaagaaatagcacacttctgtatttatataatattaactagaggctaaattggttttacatttctctctggtagtccatgctccagatatcgagaaaaatgttcagatgccaggctcaaatgctgcaagttgtctctctgtggtcctagagagtctctgtggcaacaaggttttattctaaaactctctgcctattttttctaccaagcatattgagtgagagaccttaaccgtctaagccaagaactctctcaaagttggttcttccttagtggtagcacatcttcagactaagaaatctggtccaagaggggactgcctctgggggtttcttgggaagtgtcaagactgaagtctcatgaaagtgactgctgtgcctgttgctgacatcagtgttcccactgggtatgttgctcattccttgggaatttaaaagaataacaagtaaccaacaaatcatcaaaaaattataacatgttacccaattcttgaaagcaagccagtaacactaaaatctgcttcagtgtcatcaatatgaattcctagtgttttaagtgaggtgcttgaacttgcagcagcaggataggtagagaacacagcctacctatgggtagattgtaatctgggttagattcccatgacatatgaaatggatttgaggttgactgatctcaagagcttattctatattgtatcaattagtaataatatataagtacagtatgtcactaatcataggtgtgaatagtcttagtaaaaaataaaatagtggaagaagacatgaccttttaacaatattactctgttttgaatgaaatagctttaggtgcctctttaatgattttccttaagtaattgcaattttgactaagagtaacctctgggaaacatataagtatttctggttccaagtcaggacatactgtagtacataagttttcaaagaaatatatgtagggcttagaggtaacataatatcaatttattgccttatagtgaatgatgataaatataatacaaagatatttgaaatacacattcttctaaagattaactagtgtttcttttgttatgaattaaaggtatgaagatgttgaaccagggtctgtgtcttttcacatgtgacgtttcctgatggtttctagggaagtagactaaacatgcagttctgacgtaatgcagcctgctgtgttggcttctggttagctcagactcttcaactgccaagaaaaaagtctctgaaaagggcaaaaattttcaacctcaggagactccgataggaagaccaggagtaggtaggggatgggcaagagtaacttcattcttaaggagacacactttatcattcttatatttgtcttaatcctccaattgatataggccagatgaatttctgcttaataggaggttttttcaggaattgatacaaaaatatatacactgggtacagaaacttccagcacagaaccacgaagtgtgttaagccttgttcatgatgtaataaatatttaataggatcactttcgggaaagcaagtttttgctactcctaagaattgcattcagaataaaagtatgaacttgaaatggagttgggaaaaggtttctttctggtactcagaccccattcttttatcattttgcatggacattgataaattcattttctctacattggtagggacaaagttttcaaaaaatgaaatctagattctcctgtcccaaaagactgtatgtgttgctcataagcactaagtattgagtatatgcccctcgctgaataatgtggtatacatgtcctcactgaataacggggtagtcgggttgtttgtttgtttgtttgttttttagtcatcttttaacctgttacttacatatataaactgaaatactaggaaatcatttcagggcttgtctcgtatttactttactttgaaaccaggaattatcaaggatgaataacttaagcaacaaaagtctattgtgctacagttatataggtcagaagcttttcactaggctaaaatcaagctgccagcaagatggtcctcctttctggagactctgagaagactttatccattgtctctttcagattctagagaaatcttacattttttgccttgtcaccttttcttaatctccatcttcacatgcacaaattataggttgagtctattctgtattgtatcccatggtcccatcttttgcctactcttctctttcaaggactgtgtgattaagtcgatcaatcagagtaaccctaggtatgcttctcatatcaagttcagccagttagcaacttaaattccatgttcaatattagttgccttttgacatttaaagtaccatgttcacaggatgccagggttagaacatgcctatgtcctcacaggatgccaggttagaacatgcccacgtactcacaggaagccaagattagaacatgcccatgtccccctctttgcagagccatttacctgcttactataagattattttacaaaattggtttatgcctctctcaaatgtgaaagaatctaatttgaagaatgttttcttagtggtgctgggatgaatggtctgctaactaagaacagatactaactgacattactcattctagaggaagtaggcatctatatcggtgatttccaccataatcacagctgacaaattcagctaattctctccaggttttcattactatgtcttttacccatctattttcagtgattccacaaagctaatccttcccacaagcaaagttttttaaatgtaactaaaatcttctatcccttagtaacatgaactaattagaaattaaactagaaggtggatgtgatgaaactccaaataagcccaactggagtgatcagtagttccatgccttaaatttatccagtgggtaatatgattatcaatttccatgactcctctatcattagtggtgcaaagagaatgacaaaggaaagtatgaaggaaaaagagagaccatgaaatatcctaaatcataagaaaaattgtgtaggaatagaattgctattagattgtgttatttaagaacaatttttacttcaccttgtgacatcaccatctattttactgctcagaattctaatattgaatattttgtctgctaattttcttgtttggttttcatgtatatatgttatatgtgtatataacatgtttatatgttagatatatgttagctactcattccctatagctgtgttagagagtagtgataaaattccagtaaggaggttaaaaaatatgtactagatttacttagaagtctacaattttctgatagatttgtttataaaggaacaaaagcagactgtgttctctgagattgagggaataaactgttaaggctcctgatggctaaagtgagttttctgtccatgaaaaggcaaaagaacttttgactgagtagcatttaccaaagtgcaaatgccagataaccaatgagtagggaggtatagaatttggttagagcaatatgacaacttagagaaaagggcaatattccacaaaaacaaattgaaaagaaaaaaaaaaaaacagcaacagttggctatgtggggtctctataccttgtgaaactaaggtgagcaacactggagacataaaacgaaagtatcaaccaaagaagaggctagatgtctgtgctgaatgaaggcaacattacagcaaagtagaaggtacaaagtgcagagaagcacttacaaacacacacacattcctgtatgcatatacacacatatagatacatatgcacacatatacacatacacacatagacacatgcacacacatgcatgcacacatacatatgcacacatgtacacacgtaacctaaaacaatttttacagaaaagatactctagcaggtaggtgaggaggctcaatacttgatgtacaaacctgagttggattctagaaacctatggtggaaagagagaactgaatcaggaaagctgtcctctgacttccacacaaacagcaaggcaagtgcgctcatgtgtaaatacacacgtaataataataaaccgattagcagatgacaaatgagtggtacaattaaaagacaggaaggtggaagaacatttcacagttttactaaggccttcggacttgaaaaggttaagagctagtcctcagaacttaaatgaattaagtgctcctgagattttactagagccaggtcaagactaatcaattctttaaaattacttagtctacacagctactttgtggtttcatagaatcataattaagcattactttagagatttgtaaagtagtacttttccacgttctagcatttacagattacttgctcgtcatacctacttcaaatagcatttaatcacctgcactttacagatacaacaaagaaaacacagaatgtgcttcacttacagtcacactgttgatgaataatatagccaagtgcaaagtgcacatctcttcatatgtagctcacattattttacatttaaggttgtactattttttctaaagaaacatgtatttgcacagatgaagtcataagagtttaagtatcatgacccaaaatagatactgagtaaatgaatcggcagactctgatcattgtgacgtgaatgtccaaggtatagcaactctcttattgtataccttctcaagtgagagacaatgaccccttggggtttcatgaagaacaatctttggagaaggataactttaaaaaacttaagtgtgctttaaaaaatgtagtaataatatatattattatattactatattaataacatgctattaatatagtaatataataatatatagtatataggatagtatagtatatgtaatatactatataatatgatataatattatgttactatattaataatataatattccatgtataaataagaatgttaccagatattagagtcagggacacaacttggctgagaccactcattgatgttagaaatgtttgctgttttcagaagtcacattataaattttcacttagtatgacaaattcccagagccatgcccaacctgctgagatatagtaaatcctgcccagaaatcattacatgtttagctcacaatagcttaaaacctccaagtgttcagaattctacactatgtttgatgagggtcattaggatctaatggagacaaaatgattctccctacttttaccccaaatctcagcacaacagtgcaagaagcctacatatctatttctgctttctttattaattttactctctattaatcttaatcatttctggatcacggcattgtccccctaaaaattctcaagtaataagcaaggtttttatacaaccattgacttcacaatcccttttctacattaagatggtcttcagatacacaaggaagtggttcgtttcgctcagagaataaaactctaatcatgaattatttaacggtattcttacttttcaaacctttattactggtgctggagagatggttcagtgggaagaactgtcctttctctgaacattaggacatatgtttagatctcaacacacatgtaaagagctaaaaaaagtggctatgtgcatgcttgcaactccagggctatggaagataaagatacaatttctagggcttggtacctgtcactttcctaattctgtgagagactttgacacaaaggtataagtcaacttctgaccttcaaaagtttacacatccatcaacaccacacacaaacatgcatacaaactcacacaatcatttccatttcatcagatcttgtttcctaggtcaccttagacaatttctaaatacctcacttaaataacaaatatgttcctcaaggttaagcaagacagcgtgattcattccttcagagcctgccacattttcattcgttttcaggtcatgtacttaagtgtttcccaagacattgtctttccccattaaaatcaacgcgtgccacagacccggcctaatcgcttccccccccccccctcgccaccctcaatccatgggaatcaggggttccacggcagatgggcatagagtcggcggggagtgacaaacagactcgacacaaggaagtgtggatctgaatgtaatttgtcaaatcgagcatcaaactttttatacaggagaaaatagggaagtgaggtgacacgctggcaaggtactatgaggttaccggatgcttacataaaacagagaaatgcaaacatggaaggactggcaggaacaaactggggtaaaattcgatgttaacaacttggatcaaaaacagctccacctaagatccacttaatcttaggagccaggggcaagggcttcgtgcccttgccatagttcctactctagtctattgtatagtctaccttccccctaggccattgtaaatacttgaatatgggtgtaactcagctatctatagttctaagtatctactcttgttcctccttaggtcgcaaacttccttcttcctagataatggtaaatttctgtgtagggcagtgacttagctatccatgcccagggtcggatcaaggactgccttgaatctaacttcgctatatgtcaaagtatcaatccttaggagcacttgtaataaagcaatattaagggaaagcacagagatccatttaccaactaaagcaaggacattggagcattctttatacaggatgccacgattccaggagactaagtttccatgaacttttcgccttgggacagcgcctaggtttttgggatgtagcaaccgcgcatgctgtctgctgccctcactataccctttaaaatggaagtttcatcatactatgcaatagtccttcatttgggtggcatcacagggaaagcaaaattcaatggattacaacaaaagcctcagtcattcaaaacctaagggtgactcaggtttcttaaactatgtagtaccacttcaaaagaggacaaaagccctgaaattgatgcaagatgatccaggatcatatttcatgactttaaaataagctcacattcccaaatccaccaaggcatcatgtatggctgctgtggaagatactttaagcaagtaaaggtgattttagaaactttcaaattttcacaatcaaaatgctcttccattcctcctgtttctctttctggttgctttgaaaaactcttgttaggtctttgcccagcttggatctaagaatggactgtagcctacatgcccaaccttgtgaaaacatggaagctcttaactctacaagaatcctccaaaattccaaattttagaataaatataatcacctctcatgtctctggaaatgtggcttcctagagtctcttcttgccacagtctagtgattcaatcattggcttcatcccaaaaagaacatactatcgtgtgacaagctggaatgatttttccaagaaccatgatgattctgagtgggctgtagctactcagtatttgaggggaagtggctaatgggataagaacgccatagcaattaataaggcttattaagacaatttgtctggaacacagagttctaaacacaggagaatgtacaggcatctatctcaatgtgtgcccatccatacttttcttcattacgtgatggccattaaattaagaaaaagtactatattttcattgtacttattcaatatatattgagtgaatagctattgcatgactcttgacagcaaaaaaaaaaaaaaatggaattatcacctagtttcagagcaatgagtagatgctcaccaaggaaacagggatatatatctcacatgcttcttcttatacataaaagcatgcaaatgggttagaaacccacccctagaaacctcacaacactatcttcctcttccgctcagcctgccactacaaaatctgctctagccattgtatgccatgttagaaaactaatgagtcaaaattaagatagaatttctataggataagtgatcatagtctttccacactagttattctacttgacataaaaaatagaaataaaaattcaatgtcacttagataatctgtaaaagaaatacatatgtgtttgttttatattataatagcaattcaaagtaatagaaggaaccatactatctagaaacaaagaaatatcacagaaattatgttataattgacagtgtcaatattgaaaaatacaacagagaattttgaggttcccccaaaatgaaagcaattctttgatttattttgccttgattatatatttattacaaaaccatattccatttttctccaatagtattttatgaagaaaatacaaggcaggctacatactaattcaatatgtgaaactatagttgttaagaaaaagttcaccactcaacctatgtataacagcaaacacctgagggtggaagcaggagtctcagaagttcgtggttatattagttatgtagggacttagaggtctgagtgggctagagacactattttggaaaaggataaaaaaggcaaagattataaaagagaaacctcttgaagattcaaacttctgaaatggtctttcaaaggaaacatttccatttaaaattatcaaagattacattgaaagccagggagtcttagaatttatatttttaaatctaccaaaaaagtagaacttttccatctgcgggtaggaaggaactataaatacatgcatgtatacacacacaatgaagcacatttgatacatgtttgtttactgttccaaccctcacccactctgacacacatcaacagtgatacacaaagaatggtggactgttaggaataagacacagtaaaaccttactaatacttacaaatcagtgagcatccaactaccaaaatattttgaggaagttaattcatcatgtaaccactatagaagcaattacaaagagctgtcttgctgattgagacaatgcgtgtggtggaaagcatgttcagtgtgtattgtcatacaaaaatggagaagcaatcatttcaacagctcacactttttcctgcaggtgaactttgcccttaggctctttcttatattatgagtgaaatcaactaatcacaaagattaatatagtaaacattaagtatgataattgtcttttattgtttgacaaagcctagaatgggatggagactcaataaaggattgtctacatttgggctagcctgtgtcatatctgtggctaattctcttaacatttaagtggtgtggtaagatgcagcccagtgttttcaacaccagtctctcagctctgtggaatgggacatagggcaggtggcaaatagaagatctgaactatcggagagtccaaacaacaacctaaacacaagagaacaaggaagcaagcagaatgcatgctggtatttctctctgctcttggctgtggatatgatctgacctagccacctcaagcaactttttctgtgacttccctgtggtgatggctatactctggaattgtgaactaaataggacttactcatctaagttgcttttatggcagggtttgtttatcagagcaacaagaatgaaattacaatactacgtaaagtttctattagcactttaattcaaatgcttgcctgatattaggaacagaatgcagggctttgtgtatattgaacattctctctactgccgtagtacaacctcagttcctgagtgttcttcaaaccagttatgacaagagttggaaatgttgtacaacaaagattaaggccaaagaaaatagtgaatcaaagccaagagagaaagagagagagagagagagagagagagagagaagagaagaatatgcaagcattttacaattagctttatgtaaatcaataggtagctagaaatattaattagcagtcataaaggctgtaatgtgtttagtggaaatgtcacaaagtacacacacttctgggttgttgactttatattccaggtatttgctccaccccacagggtagaaaacacttcaaagtaaagacaaagttgctgtcatagaactagaaatagacagcagagtgaattagtgcataagaggatgagagaggggagattaacgccacactttcttgtatcatcagtcttgcaagcctgtcagcaaaggcgaggcattcagtcctgtcaatcaccgaagcagacagctcgggtaagggaggaagtggagtagaatcaaacatggctatcaacacttccctttctgtctcggaagaacaaaattctgagtcaaattcttggagcaagtagaaatttatcctaatgaaaatcaaatgatacatgaccagaaaagtgtctatctttggaatttgttcagttcttcaatttagccagctggagtaaatttcccaagcctcattttggtcggcttttggaaacaaagggctctcccgctaattagaaagctatatttcatcaaagacgaagacaatgcccttggcttagagattccctttttaaaacgataccaacaaaagcttctgctgcatagttaccgtgaggagatttgagaccatgtcttccacacatggaagaatagcctatgagcattacatgtgaagctgaagaaaaatgggtaaagccaaataaatttttatttagaaatctacaaaaattgccatgattatactaccttatatccaaaagaaaatatcaaaccataattattatgagtggaatattgacagaggcctggggagatggctcactgggtaaagcacctgaaaggcagggaatatctaagacacagtagtcaggagcaaattttatcagaagcaaagaagtgtgcacagagagaaaggaacagagagaaaagaaggctcttaaaaaatggagagagaaattgttttctgaaatcactttccactggtagtcaatgtccagggcctgtctagccaggtcagccagaaaggggctcaccagaagggacagaagcttaccaaatcttttatcctgggtataaaagaaaacagaactaggtcttctttatggcttctctggccccccatgtgaacctgtttgagtgtcaggtatctggctagaatctggtccctgagctggagctgtgaaaatatgagccagctcagaaagatttagaccaagaaaatgaagatatacaaagaaactttcttttgaaaatgtaagctttctgagcaatctggcctatagacaggacttgcagccttcttgttgtttggtgtcatggccattttaaattgacacagaatttctgagaaagaatgtaaaaacttctttaaaggaactaattatagtcaggaaataaaaagaaatttctccaaatctcctggagttgcgggatagatagtctgaccaataattgtaaatacttttatggacacttacagacaatataatttatgtactttacattcagaatctgcctacagagatttctaagagtcttttcactgcttttaatatttaaattaccaagagaacttgctgaagtaatttgaaaaaataactactctccaaatcaaattttgacaattcaaaagacgtgtgacctgaacatgcacagacctttattcttgtcattattctttaacaagtaagcataataaattatttacaagttgtagaaaatatattaggtatgctaatagtgtcaatatgatttaaagtacataagaagatgggttatatataaattctacttcattttatataagacactggagtttccttgcatataagtccatttggagatactcactaatattttgaaaagattaggtccaaattgaaatttcttcaattgcaagtatatttttctgatgttgttttttattttatgaaaatgttagagcttagctgctgcttactggtacaatattggtaagaatgttatgagagtaattagtaactttttcactgaatttaagacatgctttataagttggaactcatgcccgatgccactgataaggccaacaacccatgtatccaaggggagtgcttattactgttattatgctaaatggaaagaacattaaatcaactcctctatggcttaatctatacccatagattagtgcatctctcaaccttcatttgggaagcttcattttttcagtaaatggcagttgacatagagaccaacaactggtcaaaggtgcaaagaataggagactccagctgcagccccaaaagggatatctgtatcacacttgctccttccaagacacagggatcaccacttaagggagtgagagaaaggttctaagagtcagagacaatagacaactacagagacacagcatttcctgggcagagcagggctgatgcaaatatgactcacagtagttttgacagcctatatagggcatgcataggacatgcacaagatcaagccaaagtcccatcacgggggagggaagaagtagcaaaatcctacccttaaactgaagaactattagcaacgatggtttctgaaacagggaaaatcaatggattttatttgctgggggttttgttttgttttgttttgttttgttttttgtttttgtttttcaggaattcagctcttgagaggctaccaatgctccataaaatgaccttagaccaatgtacatcctagcaggactaagtggtctcaatgggtttgaaactgaaatagttaaaattggaaggtagtaatccagtgtgggcattgacagggaaagagtataattgattaaaatacattcttaagcaataaaaacttccacaaattcctgaattatcagtattcctatttcagtttataaataatgtataaaagtttatagctgtcatataaaacaaccaaaatattttatgcagaataacttgttagtgggctgtaatataaacaaagaagtcatgagttttatgagtaaaaaaatgaatcaaaaaagatttaatgaattacattgtaatgaatttaaagataccattgacatgatgtgattaataaaaataatatatacacttacccagtagttaggaatgtttaaaactcagcatgttattcaaaatgtgctattcaagtatgtacccatcaagacatttcaacatataaattaatgtgtttgattcagtgctcaagagttttgtaatcagacctaatgtggtagaaggcatttcaaaaataagaattccttacattgaaaatactaaaatcgctagcttcaactgaatatttagacaaataacaaggcagtttaagagaaataagcccacaaaaatattaaatataaaatatctaatataaagtgtcatgccctactctgtttaaaaaaatattatatagcaagtttcattttacatttaaaattagcacatttttaaaacattgcatatactctgaattttttaaaaattgggtagtttctccagttttcacttttaattcatttaatactgattataacaaaaagatgtaatactaggaaatatacagtgtcataaagtttcctgagggcatatgcaagtaaggagtacagacttgggatcagggcaatagagttcatggatatggattgacttatcacctggcataaaaaatttgtcagcacatgaactaaaattcaaatttcagattctgactgctaagtgaataatgaatgtaaacaaaagataactggaagaagtttcttaaaagattttcttaaaggcattgaagagattggtgagtggttaagaactcttattcttgcagaggacttgagctctattcccacatgtaagccacacagaggtggttccatgtaaccccagctccagggaatctgatgacctcctctgacctctgcagtcaatacacacatatatgtatgcaagcaagcattcaagcacagaaaataaaaaataaataaaccattacaaaaatcttcttaaaaactattaaaatggaggtcctaaaaattgtaataactgatgtttatgtttgtttatgaagatagaattattcaaaaaggactgtgaagtcttaaagactcagtaggatttcaggagcttttacctggaagcaggcacagagcatagttctacctgcacccaacaccaggcctgctcatcaccacctcgttgaacctggacgatccagagccagggcaggggttcccagggactctgctcgctgtgcttatgctggttccatccatgggaataaacttgcattgagataattctggttttgtcggcacccagagctaatcctgcgccacagtgctccatacccaaatactgccagaagagagctggcctcctgggagtgcagaaaaatctatgagcacaggtaagaccaccacttctgctcagagggaccagcccagagccctcaggacacaggatccaaggagcagcctgggacaggatccttctggtttccatctgcatccagagctgatcccgtgctacagttctccatacacaaataccaccagggaagagctggttgttcaggagtgcagacatagttgtgagcacaggtaagaacaccacttgtgctcaaattcctggctcaacagggatcctcccaaagccctcaggacacaggaaccaagaacaagaacatgagacaggatccttctggtttccgtatgcacccccaagttcaacctgtgccacagttcccatacccaaattcctaacagagagaattggtctcccaggagtactgacacacaggcttgcaggagggacaaaccacagtcagctaagacagcaagactggctaacaccagagataaccagatggaaagaagcaagggcaagaacatgagcaacagaagacaaggctacttggcatcatcagaaaccacttctcccaacacagcaagtcctggatactccaacacaccagaaaagcaaaactctgatttaaaatcacatctcatgatgatgatagaggactttaaaaaggacataaataagtcccttaaagaaatacaggagaacacagataaacagatagaagcccttaaagaagaaacataaaaatcccttaaagaattataggaaaacacaaccaaacagggtaaggaattgaacaaaaccttccaggatctaaaaacagaaatagaaacaataaagaaatcacaaaggtagacaatcgtggatagaaaatttaggaaagagatcaggagtcatacatgcaagcatcacaaacagaatacaagagacagaagagaaaatctcaggtgcagaagataccatagaacattgcaagataatgcaaaaagctcctaacccaaaacatcaaggaaattcaggacacaatgagaagaccaaacctaaggaaaacaggtatagaagagagtgaagattcccagcttaaagggccagtaaatgtcttcaataaaattatagaagaaaacttacccaacctaaagaaagaggtgcccatgagcataaaagaaacttacagaacctcaaatatattggaccagaaaaggaactcctcccataacataatagtcaaaacaacaattgcacaaaacaaagaaagaatattaaaagcagtaagggagaaaggtcaagtaacatttaaggccagacctatcagaaatacatgagacttctcagcagatattatgaaatctagaagatcttgggcagatgttaaacagactctaagatagcacaaatatccagcaaaactctcaattaccatagatggaaaaaccaagatattccataacaaaaacaaatttacacactatctttccacaaatccagccctacaaaggataatagatggaaaacaccaacacaagtagggaaactacaccctacaaaaagcaagaaagtaaacttctttcaacaagcccaaaagaagatagccacacaaacaaacaaacaaaaaaataacatcaataataatggaaagcaacaatcactattccttactatctcttaaaatctttggactcagttacccaataaaaagacacagaataacagactagatatgtaaataggacccagcattttgctgcatacaggaaacccacttcagtgtcagaaacagacactacctcagagtaaacagctggaaaacaattttccaagcaagtggtcccaagaaacaagctggagtagccattctaatatggaataaaatcaattttcaaccaaaatatatcaaaaaggataaggaagggcacttcatactcatcaaaggaaaagtataccaaaaagaactctcaattctgaagatctatgctccaaatgcaaggccacccacattcatgaaagaaactttactaaagctcaaagcacacattgcacctcacacaataatagtgggagaattcaacatcccaatggacatatcatgaaaacacaaaccaaacagagacacattgaaactattagaagttatggatgaaatggatttaacagatatccctagaacattacatcctaaaacaaaagaatataccttcttctcaatacctcatgataccttctgcaaaattgaccatataatcagtcacaaaataggccttaatagatgcaagaagattgaaataatcccatgtatcttatcagagcaccatggactaaggctggtctttaatagcaacaaatacaaaaagcccacatacacatggaagctgaaaaacctagtcagtgattacttggtcaaggaataaataaaaaataatttaaagactttagactttgccccatcttagaattgggaacaaaacacccatggaaggagttacagagacaaagtttggagctgagacaaaagaatggaccatccagagactgccacaccgggggatccatcccataatcagccaccaaactcagacctgttgcataagccagcaagattttgctgacagggccctgatatagctgtctcttgtgagactatgccagtgcctggcaaacacagaagtggatgctcactgtcagctattgggtggaacatagggcccccaatagaggagctagagaaagtacccaaggagctgaagcggtctgcaaccctataggtggaacaacaacatgtactaaccagtacccccagagctcgtgtctctagttgcatatgttgcagaagatggcttagttggccgtcattgggaagagaggccccttggtcttgcaaactttatatgtcccagtacaggggaacaccagggccaagaagtgggagtgggtaggtaagggagcagggttgggggagggtataggggactttcgggatagcatttgaaatgtaaatgaagaaagtacataataaaaatttggaaaaaacaaaaaaggaaatgaatgcactccgtactgaaacttatggggcacaatgacacagtgctaagaggaaaactcatagctctgagtggctcccaaaagaaactggagagagcatacactagcagcttgatagcacacctgaaagctctagaacagaaagaagcaaatacacccaagaggagtagatggtacgaaataatcaaactcagggctgaaaccaacccagtagaaacaaaaggaactatacaaagaatcaacaaaaccaggagttgtttttttttttttttttgagaaaatcaacaatattaaacccttagccagactaaccagagtgcagagagacagtatcccaattaacaaaatcagaaacaaaagggatataacaacagacagtaaggaaattcaagaaaccatctgatcctactacaaaagcttatattcaacaaaactggagaatctgggcgaaacggacaagttcatagacagataccaaatacctaattaaatcatgatcaggtaaaccaattaatcagtcccataacccctaaagaaatagaagtagtcattaaatgtcttccaaaaaagaaaagaagagaaaagaaaagaaaagaaaagaaaagaaaagaaaaaggatgggtttagtgcagaattccatcagaacttcaaagaagacctaataccaatactcttcaaaccatttctcaaaacagaaggaacactacccacagttacactgcgtattttccatttgagatggaacagctatctctggaatcagtaacttgtcacaatttcttctcacagaggacttcctaagagatttttttctacttctatcatgtttaatatcctaaatagattttaaaaactggttaagttcatattacttttagcttcagaaaatatcatgggtatttaagaggtatgtaactactataaattattttgatgatttacaaaaatgtcaatactgagttgtgtattttaaaataaattttattagtttaataaataaagaaacttgcatttaaaaagcacttttatctgttaataagaaatataaaacttcctgataattttgaaaagtgttaaaacatttttgtggtggtagtttaatagcaaaataatgtttctccattgaatataataaatacaatacacagtagactctgtgtgtgtgtgtgtgtgtgtgtgtgtgtgtgtgtgtgtgtgttgaatatgtacatgtgtttgagtgagtaccctagtttcctcatgtggagtccagaggaggttatcacatgataaaatttctttctctatatcattctattttatgtatgtgtgtttgtatgtatgtgtatagtgtgtgtgtgtgtgtgtgtgtgtgtgtgtgtgtgtgtagatagtgtctttcacttgcttgatgtttcaactaggctagcctttatctgtctctggccaccaactatataggtacaagtgttcccagttttatgtggaggctacagtttgaacttaggttgtcttgcttgcatagcaagtgctcctgttcatggatccctccacccagtctatccatctcctcttacccaaggttgaactttctgttgttcacctctcatattcaactgtagttctgagacattagtgacatattctagaaatcaagaaatgatgtgccacccactcagaccagcagtcatctttgtgtctagaacacctttgtgccttgtgtatcatgtatactcatttaaatagtcatctcagctacatgactctcattgtatcacactgttgatgtttcagtaacctgagtatagtagctcatcaccttatcccagtccttagacctcaccttgtcacaagaacagggatggatacagaaaataagaaattaagaaagacagaataagacacatcaacataacttttattgcaatatgttattatagttgtttttacttatatttatctgttattgtaaatctcctaacatgcctagtatataaactaaactttatcatggaaaaatatgtggagttaagctcatatacggagtagaggcagtggcaactgtgttttgtggctccttgaattttggtgatcattactgttttaaatatgttacctgaaatttgaaaaaaaatattaattgtgttagggatgcatatgacagatgagtactctgcgcctgagctcccagctccctttttatgttttagtttgtagcaaggtctcactaagttgcccaggcttaccttgaacttgactgagatccttcttcagcctcctgagtaagtggcacttcaggcttgcacctccagaattgcacccagtctctgcaatcatcactgaaaaccaagggcacctacataagaaacttaagtaaagtagccaagcttggggaaaggctagaatgcaaggactgtgccctaacgaggtcacgaggccagataacttaacatgagtctaaggtaaggcaaaggattctagaaattgtgatgccggttaacaagtatatgggatgagaagacattattgggatgcgggatacagagattagcaggaagaggagtgtgaggccagccaagtgggtgaggaagcaagcagggacaagtcacaaaggacaagaaccccgagggctgccttaggaatcttgagtttctctgcttccacctccaaccatgtacagctaatgtcttaccttaaacttttttattcttctgaattctgaaaagagtataatgtgaataggcagcgcctcttaaaatccgcttttccatttgagggtaaaacacaatataagtcttaccagaccccatcgatcagacagctgcaaacatgacttcaggagactatccctaattaacagtatgtagtaagatgcatactaatatgtcaaattaactttggctaattaatctaaaacccctacaagtccagtgggaaaggaacaaaactgatttgtctacaatctgacagagtatataacttgaatagctttaaatttcaagttgaagacattaagtgtctgcctaatttgtctataaaagatatctagtctcttacgggtttttttaaaattgtatttcttaaaattgcagtagaggcaataagcagatctattttagtaaaaacaaacaagcaaaagaggacaaaaggcttgaatgtgttcctcaaatcagctctactgggtaataatatagctgaggacatttggtcttgatggatttcagctgtgttcttcaatgctgggtcaggccgtcctgtgtttatacagcctagaggtcaaaggccttttaagtatgtatctacacaacatatcataattgctgcataaaaatacttgtacagtagcagacgccatcccttgcaaccttcctctagtgacatagtaactaaaactaatgaaagttgtaatttgcatcttttgtgcataaaaacatggccaaacttagatttacaaatcagattaactcccttttaacatataaagccatgggctactgggctactatgggttgaattccacgaaaggtctagtgggtaaattttatctttttgaagggctatttcactacttggttggagtcacagaattggtgtttctatctcagtctacaatgggaaagtctatttcacttagattttactaaaatgtttagcctagcttttcttgaaacaaaggaactacttaaagctccttagctcctcctaatggaattttggagaacttcacaaataaaccccttaactatttctaagtggtaaacaaaacaaaaaacccctggtatttataatctaagtaattgttggcactcataattccaggaaagttacttctcattcatattctcattatgcctaaacgagtattgaatgtattctaaggcttatgttttcacatagaactttaatgtataatacacaatgtgtaacatagaatgtaggaagaaaaaacaatccaagatatattctgctctaagttctaaaagtttattcattctttggtcatagttggatttggacatgttttaaagacatgatttgcaactaattttcatctcagttcctgctctatatatacctaatttaaaaactttccttacaaattacaaggataaaaaagccattgtaaattttacatccgttatgaaaaatgtgttattagtaaccatgtgatctcaactaaattttaattgcatatatttaagaaaattggattctcttatttctctacaaatacagttttcaggtgtggcagatatcaaaataaactcaaaaggttgcatatgtgtgtttgcatatatatgatatacatcataaataatttataacataattgtatatacatttatatgcataatttttgttcaataactacatatgtataagattatgtatttaagacacagatacatatatatgtgtgtgtgggtgtgggtgtgtgtgtaacatatgtaacagcaacaaagaaaatgatcctgtcaatgtgagagtggcaaaggacataaaaatagaaagtgatttgaggcagggtagctgggaggggctggagggagcaaagggagggaagaagagatgtaattctatttcaaataaaaagattgggaataaaagaaaatacttaaagaagaacgaaggagggggaaaggaaaaaaggaagggagggaggaaggaaggacacaagggagggaggaggagaaaataaagtccaactgtacttgctaactccactctttataaaatcccagtcttagtctccagacactgtgtgtaagaacttgcattttaaaatgtcatctatatttagaaccaggtctgtaaagagtctagatagtgtttatgcaaaaggctatatattgttttttcattagtagaaaataatttcacaatctcaacattatctatcatgtattcacatttgtgatgctaatttttatagtccttaattcatgtgtggcatcattatctgcatagagattccagttaccctttggaaagttagtctcgtaagggagggcataaggagatgaacatgtttgtgtggtttgtgtgcgggtgggaaactgacaaaaattaaaagcataaaactttaagacttaattgtaaataccagctgaacatcctttgtggatttgttacagataacacgattctggaaactgaaatgtcacatattaaaatatgtggttgctggtttctttcttccttccccccaccccaccatcaaaacttagcacacaaatctctaaactctgccatattctgggattttgatacttgtccttccagagttttcagtaacactggcacttcagggcaaattcccaatgtggcagttgaatccagcacccctcagtaacttcctatatatagactctgatgaaactacggaagtgtacgtttaatgtcccaggtcaccatgtccttgcatgccatcacatgttgccatcacccattgcctaccctgacatcttctttcatcagtctggcaaactgtccttcttttaggtttaacttaaaagtgatctgcggaattattttaagtctctcttagaggaggcctatgcttcctgtatgttccctgtgcgagcttgtgattgcctccacctcagctaggcttgtgaccacagttgtcatgctcctccccatgtctcacatgttggctcaggttagaacattaggtgaaaaccaacaaggtattgatgctgtagaatcacaatattagcttttgtttaccacatgactgccatgtcaggcaccatgctaagtgttctacaaacatcttactcaacctttaataagtttagcaaacagaaagaacagtttgtatttgaagtatcagctaatcccgaggcttatcagaaccttgcaaaaggttacgcaactccttgtattagagaaaaaatctgagcagtgctctctgacactaaggatggtatctgaaactgaacagcaagtggctctctacaagactgttggtctattttctgcttttctaaaagactctcacagactatgttataaacaatagaagcttacttatcacatggatctggagaccagaaatctaagaatgctgtactgctatttcatgatgattccccaactcaactacatggttaatgttagaaaagtgtgtgtgtgtgtatgtgtgaggcagagagaagaaatgggggcaaacttgttcttgttatcgggaatccatccctacaataacccattgccatgataacaatattaatctatttgcaagggtagaattcttcaatgcagtcacactttccaaaccccttcaaaactgtggttaccatgacaattaaattttaacatgagttctaaagaggacactcaaaccttagcgggttcagattgcactcaattactaataggaatttctctttgattatttcgtctcaaacttacttcatatagctagaacacagggggaaacgaatgttcttttaatcattagaatctgtctcaatccagtcaggtccacctacacatagtcatgagtaccatacacaagtatatgcagtgaagggtaacacacacacacacacaacagaggggggggggagagagagagcagattattttaattgaaatactcagtttgcaaaattgcaaaagagtcacaaaataaatattaaccacatcaatgaaaactcaccaagttactacaataaaaacagaagtccctttaatgaaaaccttacaaaattatcccaaaatgcacgtgatttttttaatggactgcagccactctgggcatgactatttcatttcttggacaagagtaaaaatgtgttatttgtgcagaaaaatcgtgaacatttccaactactaacacatggcctgtgaggaaaagaataatcccatatttttttcctcttgcgcggtaaccctccagtggacagcaaccatgcacagtgtgctagtttcctgttgctttagctgagcgtcccttttcactcagtgtccagagtatatagctatttattgactaataaagccataatactaaacttcaagatactccctaaaatgattctgcctgtcttaagaaatattcatatcagtttgttaataagcagaaatagcttggaagatgagttggttgtgacaagtggccaaaagaacatttacatcaaaccataactgagaaagaaacaatacatttcttatgtttctaaaaaactatggctgggatcacagctataatatgttgggtcatcatcaagagaacaatgtcaaacactgaacttctgggcaattttctttaaaataatattttttaggtcagtaattcctgtaaaactttggaatgatttttgttgactatttttagaattgaactcaaacaccctcaaggtggccctaaaactagagatactatgtcatccattgcttgcaagtaccacctgagaaggaagaacagtgtgtggggaaactagcattggctaggactatgaagtgttatgcagctaaaattatgctgcatgatcagaaaggtaaatttgctcgtcggggttgcttgcgtgtttgtttgtttgtttgcctgtttagtttctttactcaaggcagctctaccaatatctcattaaaaccaacaagaagtcccgggatctgtctttagaaatcttagcaacacaataactccttaatggaaatagaaaaatgaactcagcaaatcagtggataagtagttgagcttagaaatcatagccggctgcttttgtccaactccatgtgcctcgaataactaagcaatctgatacctgtttcagcctcctcgagactctcattttttactaactgtcctagtagtgctcaacatgtacagtgttaaactcaaccagtaaaattttctgaagcaattggaaggttttataaatacaatctcatgacaaagctgttcatggcatcaagccattaatctgaggagactgaggtgtctctagtctacatatcaagtattaataacactgtgattccctaggattctgtaaccagagcaccagaagagaagccaaactaccaaattcaatatttgcagcctgtttcaggacatagaaatattttggttctatagcacaaataatttttctgaagtactttcatccataatgcctcagtgtaggcagacagatttcaaagtttgcatggctcagagcgtggggtataaatgtttaattaagaattgtcacatcaaagactagttggttccaagttttaatttataatgaattgatttgggtataatttcttattgttatatatgttaatgaatcttactaaaaccatagccttaaaaatgataaattttatgaaaaaagttctcctgacaaaattaattttttattcttaagaaaataggaaaaaatctattcgttttggcatattggcaaaatactcaccatagttttcctagttattctataaaatttaccattcattcttgctccatatgtgatacagtgtacctactcacatgaatacctttatagacatattgatttcaatggaaaaaataatcatctcatagtatgagtctgagttaagtctgtgttagaaacccactttaaggtcaagaacctctgtggaacagagcatacatctgagaaatatctgcttgatcaattgaaaacataatgtgtctctccttgtaagttatactattgatatattgataaattatatcaacacaccccacacacagagaaattgcaatgcaaattaatttcattttgtgctaaagtaaagcgtaattacgttggtatgcattatgaactattatttctgtatttgttgtgcaaatcaattctcttctctgaggtaacatgctaatatcaccacagcttgcaaatgtgtaactgctttttctaaatttgagtataaaataatgccttaaatatgaaccagataatttacatatcaatagtattttcatatggtaaaaatatacgtaaagtttctcatttggtatgcataagtgactatcatgtaaagtaaatcccttaattctattagtcacacaaattctattggtttaacaaaagcagctgagtgaaaggcttaaagagcatgtttgttatctatgagtatgatatgtagctctttttagcatgttaaaataaccaaggaggatataattgaatgggagtttttttttttttttaaatgaatgtccttttattttaggaaaaaagggaagagagagaaaacgaaaaaaactgaataaagaagaaagaaaggaaacaagctcctcctctgacagcaaaggtttggagtccagcattgagaccccagaccagcaggaaaacaaagagaggcagcagcagcagaagagaagagcccgagacaagcaacagaaatcggtatcagtcagcactgtacactagagggtcctgcgaggttactgtagactcatgatgctgctatctcaaccagatgtccaggacaggtgttctagccattagaaccacaaatggacaacacatcagttaccactctgtctaaacaacattcctaatagttgctatattcttcatacaaacatagtaaacagcaaagagccaaatgttcaaagaagggatactttcagatggttatcttatgtgcttctgtgtatttttaaaagatgagaaaatttgtacataattatcaataagctataagatatcctcaatgtaatgacgacagctggagaagaatcatcttttctttataaaaaaattattcttcgaataattgtctttaagaagcaaaaggtaattctgcaacttcaaaaatgcagtgtccctcaaaaccaagatttgtcaggggagagaatcatggctccatgtacagggtggatttgtcccggagaactagtgaatgctcagaattagggcctggcattttgaatcctagagttaatcatcacagaagcaagtggtttaggattgcttcggttgccctcctctgcaagaaactgaacatgcataatagagttaaatatattgtgtggagttggaataaggcaagctgtggaagaaatcatagagctggagaccatcttgtgctttccagaaccgtgaggggttttggtcacctggaacagggctccaatctatattagcactgtgtggttgatcttccactactccttggtttatataagtctgtaaacatgtacctgtacctttcttccaaaagtaaaaccatacttactagaagaaaattctaactttatggaaaacaaaagtgtaagaagaatgtgacatgtttgcaaagttgagtgttttctttctgaaatgaggggaaaactattttattacctgcctatgggtccacctggaactaaagggatactactttctaacaaggtgtatctagtaggagagaaagccaccacaataaatatatttgttaatagtttttaaagcttggttcactttgttttcttgggtaagatttagagactcacaaactaggaaaaagaaatctgctcgatggaagaacctgcgtcctacaaatttagaagataggattctcagtgtttcttccataaatccatcattagctgagccaatagaagcttacttccagggtgctaggagatatttattgtttttcttactttaattttaaaaacatattatgggcacatgagcctaccttaaaggatctcactgacctttccccttcgtttcttagagatgagcactttgttcctcctgcatcttcaacatttagccatttcttctccatatttcctcagtctatcgctctctattgggaactggagtcaccctagcaggaaggctcagctatctttcccagaggacccaggcaggcctgtgcagaaggagagaatctctgagtgtgtgctacaaactctcatgacccacttagccttctgcaacgacaggagatgtgcagccactctgggtaccatggttccagccctctcaagttcaccgcctcctgaagaaactggactgagtctgccttctacctgtctgtttctggacatcttttcttcaccaactgtactgctcacatgggccacttggcttaaatggttttccacttctcttttaagacataaaagtttgaaatagtgtatacctatttcttattctggtgtttcttttctcatctgtgagccataagctttccagtcaactggaaccttctatttagaagagttcttattcaagcttcatgtaaaacttatattacccaagggaatcaaaccttactctacagaattatgttaagtggaactatgtctccatttaagaactattgggtatatcaaacagcatattcttctgttttggtgttattttgttgagtgtgggtcaccaacatatttttacatatatttctcttcatcaatatcttcattcttccaccaacgtttcctggtaaggtctaaaaagaatctacaatccaccaagagagagcaaacaaagaagaattattgtcaggttttcctatttggccctctacactacaagacatttacatctttgattcaaaatttaaatatattaagtacaacagaaaacaaattacaactaacattaatcatattctgtagaatatacatgataacaacttctattaaaatttcaatctacctgggtagatccttaagaataacatatcatataatactcaaataagcaaccctccttgatcaaggtctcaccagtgacttacagaaaacttcttgaactcaccctaaaaggcattcctgatagtaataaacgttcagaaaattcttgatacagaaatataattcaaagagtagaacatcacatatctgtcagtatctacttcatacccctaccctactttcctaattctacctattaaactccaaagtttagctttatagctgttctatagcctgagcagttgtccttgtagatctgtactcaatttcacactcacacacaaaaatggtatctatgagtcagacaggcaaatcaactttatttcttgattaacatacagaatctcaccaagtagactgtataatgatttcaagaaataaatataaatttaagaattgtgaaagcagaccagtagccactcaaggatgaatacgaatttgctatttgtctttgatctttaaagcaagaaatgattttcctagagaatatgtacaattagtagtcagatagatatttgatatcttttggagatgtgtttcaatagcaaaatgactgaataaattttttcttagtaatgcaactgtttttaggcatattatgggggaaagaattctttctcaggaaaattcattatgagggggtaacatctcccatgctaaaggagtatgtgtgaaattcatcttccactaaaaagttaattaaaactgttggtcagatcaattgagaaatcccattttaattcttttctagcatatattagctgtgcaccataaacagttttcttaaatgcccatacattttcacatgtgtacataaggtatcttgatcatattcacattccattacctgttcttgtccacatcctattcttgatgatctcccgctcctcctcctcctcctcctcctcctcctcctccttctctttttcttcttccttggaactgggtcccgttttactcttatgtccttctgttttgttctggtttggttcttttatttgttttgtgactcactgaattttgttatggttactcacagcagcttgggtgagggctggtttaaagctacatggacatcttggccactagctgcaccattacagaaatcttaccttcttgcccccattaacagttacaaatctgatctccccttccgcagtgacatgttgttggtgaaactaatctcatgcagatctcatgcagacaatcacaactgctatgaattccccagtacctagaatttagttctccataaccctgacccttcattcagctcctggactctacctacacttctttcatgatatgctatgaactccaaagagagtgacaaaataaatgtcccatctatcattgagccttcaattgtaactcagaaaaaaaaatcccatacacaatgacactagggttctgtctgcaccagtaactgatcctatgcctaggaaacagctggtctccccagaagtgtgggcactcctgtgagcacaggtaagaccaccacttctgctctgagggaccagccgcagagacctcacaacataggaactaaggagcagcctgggacaggattcttccagtttacatctgcaccttaagctaatcctgtgacacagtgcccagagctgatcctgtgccacactgcttcatacataaataacattgggagagagctgaattcccaggagtaccggcacacctgaaagcacaggtaagactaccacttctgctcaaatacctggcccaagagggactcacccagagccatcaggacacaagaaccaaagacaagaacctgagacaggatcgtactggtttctgtctgcattcccaagctcaacctttgccaaagctcccataaccaaattcctaacagagaattggtctcccaagagtactgacacaggcttgcaggagggacaagccacagtcagctaagacagcaagaccagataacaccggagataaccaggtggaaagaggtaagggcaagaacatgagcaatagaaacctaggctacttagcatcatcagaaaccacttctcccaacacagcatgtcctggataccccaacataccagaaaagcaaaactctgatttaaaatcacatttcatgatgatgatagaggattttaagaagaacgtatttaactcccttaaagaaatataggagaacacaggtaaaatcccttaaagaattacaggaaaacacaaccaaacacggtaaggaattgaacaaaaccttccaggatctaaaaatggaaatagaaactataaagaaatcacaaaggtacacaatcgtgaatagaaaatctagggaagagatcagaagtcatatatgtaagcatcaccaacagaatacaagggagagaagagagaatctcaggtgcagaagataccatagaacattgcaagataatgcaaaaagctcctaacccaaaacatccaggaaattcaggacacaatgagaagaccagacctaaggataataggtatagaagagagagtgaagattcccaacttaaagggccagtaaatatcgtcaacaaaattataaaagaaaacttcctcaacctaaagaaagacgtgcccatgagcatacaagaagcttacagaacctcaaatatattggaccagaaaaggaactcctcccatcacataatagtcaaaacaacaattgcacaaaacaaagaaagaatattaaaagcagtaagggagaaaggtcaagtaacatttaaagccagttctatcagaattatatgagacttctcaccagatactataagatctagaagatcctgggcagatattaagcagactctaagataacacaaatatccagcaaaactctcaattaccatagatggagaaaccaagatattccatgacaaaaacaaatttacacaatatctttccaccaatccagccctacaaaggataataggtggaaagcgccaacacaaggaaggaaactacaccctagaaaaagcaagaaagtaatcttcttttaacaaactcaaaatgaaatagcctcacaaacaaaaaaataaaataacatcaaaaataacaggaagcaacaatcactattccttactattacttagcatcaatagactaaatcccccaataaaaagaaatagtataacaaactagatatataaataggacccagcattttgctgcatacaggaaacccacctcagtgtcaaagacagatactacctcagagtaaacagctggaaaacaattttccaaacaaatggtcccaagaaacaagctgaaatcagccattctaatacggaataaaatcaactttcaatcaaaaggtatcaaaagggttaaggaaggtcacttcatactcatcaaaggaaaagtttaccaagaagaactctcaattctgaagatctatgctccaaatgcaaggccacccacattcatgaaagaaactttactaaagctcaaagcacacattgcacctcacacaataatagtgggagaattcaacatcccactctcatcagtggacatatcatggaaacacaaaccaaacagagacacattgaaactattagaagttatggacagatatctctagaacatttcatcctaaaacaaaagaatataacttctcagtacctcatgataccttctccaaaattgaccatgtattcagtcacaaaacaggtctcagcagatgcaagaagattgaaataatcccatgcatcctatcagagcaccatgaacttaggcttgtctttaatagcaacaaaaataacagaaagcccacatacacatggactctgaaaaacaccctagtcagtgattactttgtcaaggaagaaataaaaaagaaattaaggactttagaacttattgaaaacgaatgcacactatccccaaatttatgggacacaatgacaacagtgctaagaggaaaactcatagctctgagtggctcccaaaagaaactggagacagcgtacactagcagcttgacagcacacctgaaagctctagaacagaaagaagcaaatacactcaagaggagtagatggcagcaaataatcaaactcagggctgaaatcaaccgagtagaagcaaaagaaactgtgcaaagaatcaacaaaaccaggagggtttttttttttttttttttttggtttggttttggttttttgtttgttttttgagaaaatcaacaggatagataaacctttagccagactaaccagagtgcacagagacagtatccaaattaacaaaatcagaaatgaaaagggagatctaacaatagacactaaggaaattcaaaacatcatcagatcctactaaaaaagcctatattcaacaagactggaaaatctggatgaaatggacagttttctagacagataccaaatacctaagttaaatcaggatcaggtaaaccatttaaacaatcccatagtccctaaagaaatcaaagcaatcattaaaagccccccccccaaacaaaacaaaacaaaacaaaacaccaggaccagatgggtttagtgcagaattctatcagacctttaaagaagacctaataccaatattcttcaaagtattccacaaaatagaaacagaaggaacacgacccaattcatgaagctacagttatcccatatattctcccttggagatagaatggtttctgtctaattaggaatctctcacaatttcctttcatagaggacttcataagagtttttttcaatttctatcatgtttaatgttccaaatagattttaaaaactggttaagtgcatattacttttagcttcagaatatatcatgtatatttaagaggcatttaactattgtaaattattttgatgacttaaaaatgtcaatactgagctgtatattttaaaataaatttgttagtttaataaaaaagtgcaaaaaataaataatgatacctattctcactaatttaacagattattgtttgtttcaatttttagaaaaagagacaaatatctgggtctcttttatgttcagtagtgttctcagtaagatcatacaattctgtcaaaatctctctaaagaagttagtgctatccgtgtttcacagatgagagacttgagacacagaaaagtatccaacaatcgctagaccatatgcagtaagcctagaagtctacctatctgtggcctccatttgtcattatcttttaacatcatttaattttagttgcaatgttgactataacatgtcatgatctaagactctacctcatgaagatgatcaagaagttctatgagaggattgtcccagggtaagacttacccataaaccagaacctagcacatggggctcccactgtgatggtatagtaaatgaatgaactaagcagcaagaggactaaaaaggagaatgagcaccatgtgccatggagaaaaccaaacatcagttcaaaagacatcagcaggtctgaatcctggaaacgacctgggattttgcagaccttgatgcccctggaatagatctcagttaagtttctctctatttgctcacacagtgatggccaacaaatcatctttcccttagccctcatgcagagatgtggaaatgcagaaatgcatcttcaatgttggaacaggcaaatccacctcaaatgatgccttgctgtcttcagccacattctgacattgactccacatgttctaatggtcatgtagcttttcttgttcatctagttcatgtaacaaagaaagaaatgatggtggggagaaaggttagggtgggagaaaggaaagagggacatttgggaggaaaaggggaggaagcaggagtaggtgggttggtgagcaggaggaggaggaggggataggggggtttcagagaggaaaccaagaaaggggataacatttgaaatgtaaataaaaaatatttaatagaaagaaagaaagaaagaaagaaagaaagaaaggaagaaagaaagaaagaaagaaagaaagaaagaaagaaagaaagaaaggaagaaaaagaaagaaagaggagctccaagatagcaatgacttttattcctagtcactatgatacagggatgagagatacctgactagtacaaatattccattttctagtataccaacagcataaacatttcaccagacaaaatcacatgagcataaaataatctggcacataaactacttcactatctggagttgtgggtaatgaaatattgcccaaaattggagatgttaacattgacttggcagacagcggtgcttaccactgagcctaataatgcaagtttgaccctgtgaacccacacagtggaaggtgaggacagactcatgaaagttgtttgctgacttctgcatgtgctctgtgtcattcaacacacactcacacacacacacacacacactcatacacgtatgcacacaaacacactcacatacacacacactcacacacattaacatatacaaaatcaatcagttaatcaagagagactacaagagattaaacttttcttcataaaggtggagagttggtaaatatcagggaggtttagctttcgatattgaacaaactgcttttccttccccatttctcacaacaccacttcctcactggggattttattcttagagaacagtgttcagaaccattcccaaaatgagtgagtgaaagtgctaatgcctgagatgagcaccccaatacctctggttctctgtagccaccagcattggagttgcatctcaagcatcacgagaagaactgtaaatattatgatacccaaagacaataaaataaactgtactaattattgatggttgaactggagtcctttgtgaatcactgattgagtgttaccagatgtgaccatcccagacctgcttggccccaagctgccaaccatctgacctcagtaccttaaagtctctaaggaagaagtaagatttcaaatgcctgagaaagatatatttcagtcttatccaaagcagaaatgggtgtaatttatgaccctaaaggacatggacaagcagggtcagtttgtgaaggtgagtcagcatcatgtaaggaacttcttgtgttcttgattgccagactcccttttttttttttttttttttttttttgatacagggtttctctgtatagccctggctgtcctggaactcacttcgtagaccaggctggcctcgaactcagaaatccgcctgcctctgcctcccgagtgctgggattaaaggcgtgtgccaccacgcccggctcagactcccttttaatgctggagtttttacagtgaggtgagagaggaggaatttattgcacatagtcaacatattcccttgttgactgtggaatgctgaaagaacactcacagcttgttatgtacacatgaaacggttaagaaaatatgtgagttgtatataaagaacatcatatagaactttagaaaactacaaattttatgttaacttgacacaggctggagttatcacagaaaaaggagcttcagttggggaaatgcctccatgagatccagctgtaaggcattttctcaattagtgatcaatggggagggccccttgtgggtgggaccaaccctgggctgttagccctgggttctatatgaaagcaagctgaacaagccagtggaggcaagccagttaaaaaacacccctccatggcctctgcatcagctcctgcttcctgacctgcttgagttccagtcctgactttctttggtgatgaacagcagtgtggaaatgtaagctgaataaactctttcctccccaacttgcttcttggtcatgatgttttgtgcaggaatagaaaccctgactaagacagaatccaaaaggaaagaaagaattttaaacattttaaataaaggaggaaatcactttagaatacgtttgtctagggtctctagattttatagatacctccacatatacataatcagacctatgatggttagaacaaatggttagaacagttaaggccttagcaattttcttccatgcctacacctttccaacacccctttccaagaaatcagtcaagtagataacaggtaaagaccaaattaataaaatataattagcaattaataagttataaagtaaagttgctttaatcaggagcatatagtccacgtttcgggtgctcactttgaaacacaaaaataaaacagtcaatagacacactttccatccatcagaaaggtgtcatgtaaataaaccaagctgatggcagcatagattctttcatccttaaagtatggcaaattactgagagtgttgtgatacccccagtaaagctatcagagtagatttgaatattctaaaaagagatatcagtctctcagtggaggttcaaggcttgtgttattttgaaataacttatatatcacacctggcattcagaataaatattaatgctttccacttaatgctaattaaatgaaaacatactattgcttttcaagctggttatttgtttcatttgtttaaagtaaagttttggaacctaaccaccacctacaaaaaatgaatatatacatatatatatgcatacacacatatgtgtatatatatgtatatattcatttaaattcatataaaacaaggcttatttaatgatcaatttcaaagagagtgtctctgtaataatcaggaatgagaccccagactagacaaaaagaaaaaagaaaagaaaagaaaaaaatcaatgccaccatacagcagtgtttcaaatgaccaaaaactaaagtaaagtccatcttgaacatccaacagagttgacagttatgatggctagccataggtgacttgtttgtcaagtggactcttcttgggagtgagatcattacagttccttagagaaaaaaatgtcagcactgcctttcctctgtccattggaaacacaagaaacaagcattatgagttgaaaacacttcagaaaacatatctccccagactgcccttcaaagggaagaaggagagggctgataattgaggtaatcagggttcctcaaagggccaggcttctgcttagggcttcacttccaagtcaatggtgaaagactccaagaggagcccctcgctcaggcctcaggacaatagcggacacccaagaactcacgacagactgagcttgttgcaaaccacatgaggctttattcggggaaagccagagctctggggacgactcatatcccacgcaggggtagaagagtcttcctcgaggggaaagagttcccagtttttataggccctcaggggggaaaggagaagggggagattaggggatttccagatctaaacaatgtctattctcaagaaatgggtatgggaggggtacaaggaaagagtctaatgaaggtgcagcaatgggcacacacctggtcagaacattggcagacacacaggttcaaggagtggccagagcattgtgc

SEQ ID NO: 791 - DNA, 1563 bp, Mus musculus
ccagaagcagctcgggtctctccagcgccccttgaccatggctgcggtacccacggcgtccgcttccctgcgctcccggggtccctgccacagccgcagccgctgcagcctctgagccccaggggccactgctcgcctggattccgcccgcagccgccgctgctgtgcaaccgaggctaacctgcggccagccaggaggctcctgcaaccttcgctcgcggcgatgacagccaccccagagcagccggctgtgttcggacaatttgagaatgcaattgttggtttcccggtccacccgtcccgcttcgcttgccatcacagcacgcctgttggatctcagtggagaagtcccgctgctctggtttttctactcttcgtatagactcgcctaacacctacatacatatttttctttaaaaaaaaacattaaatataactaacagtgaaaagaaaaaggagagaaaaaagggaaacattacagggttactatgcacttgctgcatcctaatgtcagtcaaggctgccaaggaggctgtgcaacgtgttcagattacaatggctgtttgtcatgtaagcccagactgttttttgttctggaaaggattggcatgaagcagataggagtgtgtctctcttcgtgtccaagtggatattacggaactcgatatccagatataaataaatgtacaaaatgcaaagttgactgtgatacctgtttcaacaaaaatttctgcacaaagtgtaaaagtggattttacttacaccttggaaagtgccttgacagttgcccagaagggttagaagccaacaatcatactatggaatgtgtcagtattgtacactgtgaggccagtgaatggagtccatggagtccatgtatgaagaaaggaaaaacatgtggcttcaaaagggggactgaaacacgggtccgagatatactacagcatccttcagccaagggtaacctgtgccccccaaccagcgagacaagaacttgtatagtacaaagaaagaagtgttcaaagggagagcgaggaaaaaagggaagagagagaaaacgaaaaaaactgaataaagaagaaagaaaggaaacaagctcctcctctgacagcaaaggtttggagtccagcattgagaccccagaccagcaggaaaacaaagagaggcagcagcagcagaagagaagagcccgagacaagcaacagaaatcgtctatcgctctctattgggaactggagtcaccctagcaggaaggctcagctatctttcccagaggacccaggcaggcctgtgcagaaggagagaatctctgagtgtgtgctacaaactctcatgacccacttagccttctgcaacgacaggagatgtgcagccactctgggtaccatggttccagccctctcaagttcaccgcctcctgaagaaactggactgagtctgccttctacctgtctgtttctggacatcttttcttcaccaactgtactgctcacatgggccacttggcttaaatggttttccacttctcttttaagacataaaagtttgaaatagtgtatacct

SEQ ID NO: 792 - protein, 252 aa, Mus musculus
MHLLHPNVSQGCQGGCATCSDYNGCLSCKPRLFFVLERIGMKQIGVCLSSCPSGYYGTRYPDINKCTKCKVDCDTCFNKNFCTKCKSGFYLHLGKCLDSCPEGLEANNHTMECVSIVHCEASEWSPWSPCMKKGKTCGFKRGTETRVRDILQHPSAKGNLCPPTSETRTCIVQRKKCSKGERGKKGRERKRKKLNKEERKETSSSSDSKGLESSIETPDQQENKERQQQQKRRARDKQQKSSIALYWELESP

SEQ ID NO: 793 - DNA, 99544 bp, Homo sapiens
gaagtttctctcaaagaggcatttagaagatggtcatgcagagaaaatactttcatacagtcctcactaacaggtatgcgtataggagcaattttgaaaacagttaatttttcaaagaaaatgagtaaaaagaaactatatgcattttgccccacatccttgcattccataatatatactcacccactttccatctttggggcatgttctgggtaatttttcttccttcctatctcatgtcaaatatcaggtgaatttatgtcattgttttgagaacaatttatgtataatattttatgcaatctcctcctatgtttaggaggttgccataatgtgtcaaatgtagatttttcttaatacttcataaaactatctctagaaaactaagtgcatccttttactaagttcatccctagcacactcacacagctccttttgctgctgctttttcttgcagcttctgcttctgcactcacttttccacctcccttagttactcggtgtccttatcagacacaggtctccctcatactcacacttcataatgcccctgaacaggtcagaccctctctccttgtcaaatttcagagatgtgttcagaaggaaacaatctaactaaaataattcacccattcttaactttcttgggaatatttgcatttaaaataaatttctaattgtgatgatttcaagtagtatacataacgatgtgaataattttaacaatgctaaaaaataagtagaggaaaaatacaaatgtacatgaacagagggaaagcaagctacacatacaaacataattatttgaagaagaaatcctcaaggcattagttgtctattagaaaccaggctgtccttgaatatctagtataccagttcttttgggctgccacaacaaaatactttagattgagtaatttataaaacaacataaatgtatttgttacagttctggaggctgggaagtccaagatcaaggtgtcagcagagtcattgtctgctgagagcttgctctctgcttcaaagatggcacctccttgctatgtcttcacatggaacaatgggcaaagggagcttcctggagccacttttataagggcatgaatccaatttataagagtggagccttcattacttaatcacctccccaaaggccctacctctaaaaaatacaatcacattagagattaagtttcaatatataaatttggcagagagcacattcgaaccatagtacagtgtatttttttaaaaacacaaaagacaccatattgtatataacttacaatgttactttaaaaaagtattgattcttatgatcataatggtgaaaattcaccaaaaactcatgaaaacccaatatatcattcctaactaaatcagagaatcaagtcacaatgaggaaataaatccattagttaaattgcctcctttcctaaacacttaaggtaaatctatgttgtagggcaaaatgattgtacctcatgtcattaaatctcagaattatggaatttaatgagatagtgcttcatgtttctatgcactaaaatgataagttctgctgccatttttagtagacaaaaggaaggcctcctggtaaggaggcattttcacaggattcttttcaatgagaagatgtctatattatattcacaaaccttaagtaatactatcctagctcttaagacaagagaaaagggaaggaaataacaggctgaagaaaaacacttgtgacttcccccaaaatgagaacattgaaaagatttttctctgagttccaaaccataattgcttcttatttatgtacccaaagctgaaaatttgtcccaccaatggcctggacctttgtactgctttgattttgtgaggcttcaagtatagaattaaaactcaattcagagaaagaactgatctagaaccagacactctgtataggtggtcagatagggtatatggtaaacctcagttttgctttcttgcttcaattaggtatcaactttctgactggccaaagagctccacatttggctttatacagaggttaataacctgcccattagctctggggtggatttaaaatagcctacaattctttgcagttcctcctatcaaaagataaagtctattgggtaaattctggaatctaggctggtcttttgacttgctttggtcaaaaaactgcagtagaagtgacgcttgtagggcttccaaggggccttgcaacttcctctctcacacttctggaacccagagagctccacgctcttgagatgtaatactacctgggaagagaggcctgctatctctgctgtgtcagctgacctgacagctggatgtagcatatgagagagcccaggagagaccagcaggagagtcagtcaacacacaaaattgtgagaagccataaatagttgatagtttaagccactaagtttagaagtggttcattatacagcaatacgtaactgatacaagctccatggaaagaaagtcctttgttctcctctatcttcttgcagaatacttctcagtgaggcaatcttatctacaaatatagaataccacctgccaaattggaaaaatatcatgaccaccaggcacctggagctttttcataatggcttgaaaccgcctacacctgtgacataccccacaggccaaagtgaaatcaaaatatgtttctgggaagaaaagattatatggggtgaagagaaggagagaagggcagagctaaaccagccctttatcactagtgagtaagcaaggattagatttcagaatagggaacttttagggtggggagagctggaaagcagaagggatgagcctcagcaggggatttttgataaggatgggtgcacaaaacactgtctggggagagcatgttacaaaggaataccagaatgtatagagggtgcttgggcatggagttggggcaagagaatgggaacagccagacacttacgaagaccaaccctgatttctttggtagttactctaaacattttcaaacacttgtaggaacaggggaaatgaaatgtcatctttctcacatgagaggaatctgtccacattctcactacagtaaaccagtcaaatcattaacccacacaaacccccacacaggtatcagccgtgaaccacactcccacaggatcaccactgagccacaggaattgctggaagaggaggaggcctgatgccgctcttcgagtctggctacctccctagcaaacatgtagccaaccatgaccactgacctcctcaaagcaaggcagaaaaggggcttgcccccctacctctgaatcagggccagcctaagcaaaagaaggaatccttccttatccccattaagattcaccattcgttctttaaaagctgtattatcttagacacagaatttatctctttcctcaccactatcactgccccccaagtattgttcctcttcccttccccacaacacaccacagagcccttatgacacagcagttaccacatggcttatgtgcctgcttccctcactgagggtattcaccttgagggcaggggcctagtgtccctagttttgtatctcttgggcctagcatggtgcttgccacatgttcagtgagtgctgaaataaaagtagccagacagccaaaagtagctacccaaagtggcaccagcagtaacaaatataaaccataactgatagtacatatataggtggagagaggttttcattctgttttgtttatgaatatggcagctttgaagaggtacttcctaaagcttgttgctgggtgtgtccagttcatttctgtcataaaccatagcattgcttttcatctgagcaccaatagaacccctaatataattccttcactgttcttgccttaaaggccatgcacaaaactctgcttcagtgtgtagcctggagttacccatagtaggcaccatcaacaaatattcatgggatgaatggatggcacattgacgttagctgccatctttcagtatgctttccaataaactacccttactcactgtggattgtgcaaggctcgttttggacctaacaggaaaaaataagtaaaaagtgacttagtcaaaccatgctttaagatcaatgtcagcttttgctgctgctgtttcttgactcccttgttctttcttttcctgtgacttcttgtttctgattgcctggctataattttaaacatgaactttgctttgctctttgccattctgattctagttattcatggcgatttagcccatgaccttgctctgatgtttgttgtgtgcccacttccttactttataagccttcctggcttgtaacataccctggccctctcccttcatgcaacttagttttaatcagagtgcattcctctggaaaggcaggacgacatagtaggaagggcactggcattaaatcagacaacttggtcacaagtccaagcactgacacttttgtgtcacttagggacccagcaagaatttttgaaagacatttttataaaatggccattttctatagtgcagacagggttgaagaaatcaagaggagatgttgaggcaccaaggaactaaaaagagggggaagccatttctatccctaagcccgaggagtcaaggagggtaaatggtgattctgaaacctacttgagtgctagagccacagaaaaaggactgcatgacagggctgtagtctcctgaaggatgtggcaaatgatgccaaagcagggaaggagtggcatcacttttccttcccatgatctgatcacccacaggtacccctggctaggcctgaactcaactggaaagcagaggaaaggagctctggttatttagtttatggaagtcaacttcttgggggacagagaggacagagaaaatagactttggggtaatacaaaacagccagaatcttataagcttaagcaagtgactttatctttctggattcggttgtctcatctatgagacaatgttttgagataatacatgtaaaagaagctgcaaaaattactcattggtattatccctcatctagcactctacatcttatacttttttttttttttttgagaaagagtctcgctctgttgcccaggctggagtgcagtggcgcaatcttgggtcactgcaacctccacctcccgggttcaagcgattctcctgcctcagcttcccaagtagctgggactacaggcacgtgccaccacacccggctaattttttgtatttttagtagggatggggtttcactgtgttagccaggatggtctcaatctcctaacctcgtgatctgcccaccgcagcctcccaaagtgctggaattacaggcgtgagctaccgtgcccagcctacaacttatactttcatgtctttgatagtaacccttcaacctaaatctgtgaccacaaccactcaaccttcactgttgaacttcagaagaggttcctgggatgaagggtacatggatataaatcctcatccaaagataagaataggaaaaataaaatgtgacttttatttccaactttttattccaaaaaagaaagtaataacataaagataaaaagaatggctcttagtgagatccacattcctccctcatctgtgattcctacaaacaggtctaaatgagtgctctctttatgagatgcagaagtcctttttcctgctctctgtaggactctgcctagaatctcgagtttataatttgttctttcttgttgtcccaaagtctgcagacatctagacagattgaacttgtcctggatttatctttgctgggccagagtcatctaggattcttgtaatgggttaggcatttccagaaaatcaacaagtttgaaagcagatttctaaatctggacctattcaattaaacacaattctgtaagtaaaagctgtgatgtcacacaactagaaatagctctgacatttgcaattacaagtctgtctttctttcttagaaatagttacattattgtcagagctgaaaggaactttggaaatggtttagttcaatttcctcatttttcagatgaagaaacctgacacacaacaatataagtagaaaacaaggactcaccttgatccccagattcacaatttagtgccctcttactacaacatacagcctctttgtactaaagctccatgatcatgcaaaattttctgagctgttaaattctttatattgagtactattggatattcacattttaagtgagcccagcaatcaattgatttgtgaaataagttttaaacttaggcatataccagatggtgcttgccacaattacataaatgtcccataacttcatctgggaggaagaacattctttcttgttgacagaaagtaatccatcatgggtcttgattttctcattttcttaatgctatataaccatataatcactttttaaattgctacaataattctgtctcctttctttctctctctaaaaatagttttccatcatctactaatttcaatggtgtttaaatgctgctacccactctgtatttcagggatgacttctagctgcatcagttacacacatcccaccagcagtaccctgtttgacttactgactcagatgcatccagatctgagtaactggagagctgtgcattttcagaatctgcatattcgctctgtggtataatgactgatgtcagccccaactttgccaaacatctctcatcactactagttatatccctttccaaactattgggcttgctctctctttctggagcacaccccctttcacatatttgcagtatggattcaacaatatgacaatcattttctttccttagagtgccactgctgcaatggataaaaataacttgttactgttgtcactgcctggttggaataagtggaaggagagatgagaagttgcagtatctagtcgggatatgcttagcctcctatctttgttcaaagctattctattctcctggcccaagtctcccagtctcctggttatccaaaactccctggaactaatgtgttttggagaaaaataagcaaatgttgacctctatgctgagcctatggtttttaactttctttaggcttgagctctgaaatccactggcagccacaggctactgtgagtgttgttttcttgtttgaagaaaaaaaaaaaggtactatgttttagaaaatatgccatggcatgcttttcataagcttctaagacagttgagggaacgtaaaactcagccaggcaagtaaacacacatttaatatgacggtaatatggatcaggaaaaagttattctaaagcacagcatcaagagagaaagaatactctcctcgtttatttaatgttttccttatgtttcctctgagcagagcttattccttgacaagcttttccttcccactgcatctagcacttcttttctgggatggctcaagaactgtagcttctcatttggtttgtttatttacttacactgccattcctgttctcatccaaactaacatgtgtctgcacaatgcacagtgaaaagtaaatgtctttcttcatgtttatttccctgaagttgttcatcaaatagctttttcacatcccttttgcaatctcatcccatccggctcaagtatcccagattagaaaggctgtctctggagtccttttcaaagggagcctcccatagtctttaaatcccccatgttttatggtgcagatattcaggatttgaggtattagcaagaaggaaagcaaagcagatggggacaggcacagtaaaatagagtggcttcttttttggataatcattattggaattgtcttgttatctgtaacttcgctggttcaaagtgataaactcagtcatttataagtagacattttgcaacagataaaggatggaaagtctgtgtgtgggggtgtgcacacacatgtgcatacaatgtacagaaaaagttctaccactgaaagagggatgttgtaaatgggagctcttaaaaagaaggcaaaaatcataatcctgttgaggtgtcatcttcctcataatatcaaacctaaaggagactatgcctactttcgaaattccaacacgagcatgcaaaataataaatgatatttaattaaagaattaacatcaaaaggccatctctcagattctaatttttagcatcttgaaaataatgcatatttcaagttcccttccttttgcatccaggccactttatcgcctctatcctacttttgggatgtataacaaatataccactaaaggactccagagacatacaattcacagcattgcaaacttacaaaatgctctaattcatgtaaatttacctaatttacataaattgaaggcaatccagtaatagggattacaaatggaggaaggagatagaagtgcaagtgtcacttgctactctgcaaggctttagcaattgacttacactgaattatttgagcacaaaaattagcaaagcacctatgaatcagggactctttcaaagtgacctcccagaagtttgctgctgtgttaacctgtagtgctagtgtagtccttcagatattctgttaaatataatacatagggcaggcttatgttaaaatcacttgaggcttgtgactttcgactaaatacttcttcagtaattactgaaaagttcatcggctggtgctaccggagaaaagacgtggaaagctcaccatttactaacgacagccagggtgtgccccactcaggggtgccggccctctgttctcccatccctgggtgggccagagcatcttactctctgctgccttgggcctccacttgggctgggaagataagaaagtagtggaccttccccttccttccccaagactgggaaaatctttccaaatcttattcccagtcttccagatgcgagattagaatgtacaacagatcctctcaagaacactgggagaccgagggtgggagagaaaactccaaggggggcgagctgactatagagggaattgcctgagcgggaaaggaatcttccaaagccacagaaaagccttggtttggaagaaagccgtagcacagctgcatttccaacgggaaggtcctgagcgcacacacttctgggtcctccccgctcggagcaggtaaacctcagagtagctgaccggcagcacccacagagtttcctccccaccacccgcctggcgaccaactgcagccgaaaagaaagaaagaaaggaaagaaagaaagaaagaagaaggaaggaaggaaggaaggaaggaaggaaggaaggaaggaaagaaagaaagaaagacaaagaaagaggaaggaagaaagaaagaaaagaaagaaagagaaagaaagaaagaaagaaagaaagaaagaaagaaagaaagaaagaaagaaagaaagaaagaaagaaagagagaaaaagaaaaagggagaaaggcaacagaggagaaggtcaggaaagccgggaacaagtcagcagccagaaactctccagcgatctgccaagggggagagggtagttgcgcgccggcgctggggatggggtgggggcgcgggggcacaagggcgcaggggcgcacggccaccgacagccgggtgcgcctagcttgaggccgcggagaggagccgaactgggatgggtggggggtcttcggcctcaacactgcctgccagccccagtgcgcccaagtctccccgccagagctgcccttctggaggggctcttcgcacgcactgctttccccattcttctggctggaattctccggccgtcactgcagtgtccagagatgctgcgctgtagacccgggaccccttaggcgcctcttcccgtccctctgccaaagcgcaacgcctgtacttttccagctccctctttccctcttgaaattgaaagttattgaggtcgctcagggttgttgctccagcagtttccttccccgcccccgagctcccccccgccccccagagccatcccccctcctctccccctccctgccctcctctccctcccccctccctgccctcctcctcctcctcccctatgtggtgctcccgggagcccagcccaacactggagcgtctcctgctcgcgcacgccagaagcagctcggggtctctccgccgccccttggccatggccgctgtgccgacggcgcccgctcccctgcgctccaggggcccccgccgctgcagccgcagccgccgcagcttctgagcccaaggggccgccgctgcagccgccgccgccgccgctcgcccgcccggatcccgcctgcggcagttgccgcacaacatgctacctgcggccgccccggcggctcctggaaccccggttcgcggcgatgccagccaccccagcgaagccgccgcagttcagtgcttggataatttgaaagtacaatagttggtttccctgtccacccgccccacttcgcttgccatcacagcacgcctatcggatgtgagaggagaagtcccgctgctcgggcactgtctatatacgcctaacacctacatatattttaaaaacattaaatataattaacaatcaaaagaaagaggagaaaggaagggaagcattactgggttactatgcacttgcgactgatttcttggctttttatcattttgaactttatggaatacatcggcagccaaaacgcctcccggggaaggcgccagcgaagaagtaagtgcagggttttttacgcgtttgctccctcccgccgcgttcacctgtcgggtcgctttgcctgtccggagccggctcccaactgcagcggtcctcccgccctgcgcctcgcagaggagatgcaggttcgggctttgggggtatggacggcgtctttcacccttgcctctcggcgcccctgccttccgcagcatcctagccggtgcgaggggcgggcggacgcggcgctaaggtggctcccgccccatggtaacttcaggttcgcgggaaagttcggtcctgggttagactcgcacccgggatttgtgctttccttttgaggatcggacaggggcacccagccgaaggcacttgggactcccagacgcaggatgcctctgaccgctgagtaaatgacaagggaggcgcggccgcggtacccgctcacctagcgcaaccgcctcgcgcggggagacctcggctgggcccttaggctggactccggtagccgaacgcccgctacccggccaggaagccagggagcgagcgcctgcgcggccgcatccccgacacgcaccagcggagccaaagggcgcgcgaggcgatggggttcgcgtgtctgcgcgtttgcagagctgccggacgtcccccgcccgagggttgaagacagcaaaaccccagctgtggggagccggaggtgcggagtttccaggttctctcttgtcacatgtgagcgtctgtaccatctctggccctttcaagtgtgtcccctgggacacacacgtacagagagtggggtctccctaaagattcgcctcctcgctgcccttaatgctgttatttggagggttggattgtgatggcttcttaagacggtgtcctagctggaattaagcggacaccaccacggcagcctcaacctgggttggtctgtctgaaaggtagaatcttcccaagatgaagggacagatgcgaaggtgtcacctctcctcgctccagggtagcctggcgccctcgctgctctagtgtctgtgttcccatggggagtcctttcgcagatctcagagcaggggcgaccctggctctatggttgggggcgctggtggagagagggaggaggaaacttctcctggagctcgcgaggggcaggaagcgatgctgctgctctgggctctcgcacctccgcggcgtgcagcccaggcccagcggccccacctggtttcccaaggggatccctctcccagcgtcccgcccgggaagcctttcggggcagacgtcggggcagcgcggaggacacaacaccggcttgtgtgagatggaaatttagtaatcgcttctcggccgctgtttgtccctgccctgcccctgggcatgagggtcccctgaaagctccctttgtattgctggcctcggccagacaaggtttgattcacctgaaaattgccttttaaaaaggtggcagtgccagagcgacaggggccctggccgggcctcaccgcctttaggatcacctagcagggggcaggagagcccaaactaaatatgtcagggcatccgatttattattcttggcctccgaatggtgtgtactctggtaactccccacccactctttcattccggcccggacgcggaaggggaggcctggggttcagcggtgtccacgcgcctggcggtccccgcctcctctcctcccagggtctggcctggggaattgagtctcagggtcagtgggcatagggagcccgggctggagcgcaacccactctgctttccatccgctcttccagcccgtgcccattgggcgtcccagagcacgctctctcctttacccccaccgaggacccccgggctgggagccacacacttgtcaaggagggacagggtactgagtgtcagaggcgtctcgctttgcagttttggggcccctgattctgaaggaagacacaggaaagaaagcttgtagtccttttgtgcccacctcccccagcgaggaccacggcgcaggaagctttccccgggcgctgcctcagggagctgtgggatgatgcacctctaggttgggccgagaggagtcaaaaggcaaactgcttttcgacctgccttaatcatctcaaggccaagtcaaaggagacctctgtttgtgttgaggggatgaaagaaggaatagtggaactgggttgcaattccaatttttctgtgggagtgggactgggagacagcacccacagcgatgctcttgctccttcgcacttgagtctgcgtttgcggcttggtttgctggtgcaatcctggtagaggggcgaccccttgcgtcctcggaggagacagactagactcttggcaggtgcagtatgacttaaggaggaaggagtggagggtagagaggtcctctttaaatgcccagaaactcaaggtcaaactgcatgtgcacaaactcagatataccgtttgttttgaaatctctgggggaaaaaaacgaacaaaaagattcaattcacagttcctgtttctcaagtaaggactaggaaaagtttttaaaatgaaaacatgtggtcaaacgtgttttcaaaagaggctggctatcctaattgtttcttcaagagacaattaagtgaatatttaaggagtcttctggcctgtagttatatagtttcaatttcctaagcttaaaatcatcaataaagatatgacaggtagaaaattaggtgttaaaaactgttctacaaaaaatttaatggtctctcttgatttagtaggaaacttttttgtaaacaagaacattcatttgaagtgttaaatattgtcatgtccaaagaatcatgcattatcctcagaaatagcaaataaagccatatcagtattctcctgtttccctaaaacaactgtaattccatttgtctctactttgatataaactagtgatcctagttattacaaactagtgtttcttctcataaaagaaacaatgttttaagacaagacccttgtactttaaaatgtctatttagttatgggtgaataaatacacaataaatttttatctatttgaattggtatacagctcttaaaaatgactcaacctttgaattccagattgtgtgctaataacattaagaagcactttttttttgccataatgatagccacagaatcttagtggggcctcacattttcacgtggattagttgcttgggccctgaaatagccactgaagtgaagaagcaggtacttatcttcccatcttagaaagaaaaggcctgagaactagaggctcagtaacctacataatgccatatatctagcaagtggaacttgtctcctgccatgaatctcacagttatgtacacctttattctatattctggtcatagagaagatatcaggtttattaagtaataaattagatggtctcaaggccatcatttattcaataggtttagagaataaactgttctccttgactggaaatttttgaactcattattttatataatggtgatcaatgtcaaagaattaaatacctaatagtaaagttttctaaacggaatatatcatttgattatctaggagatactatgggattattctgtgccagaaggttattgttagaaacatcagatggcatttagcatcctttttatttgatgccatctagtagctcggttttaattgttcagactctagataaatgcaagttttgaaaagccattatatgcataataatttaaaagcactcattgcacaatctataaaacttcgcaagtctttcataaagacgtctgaagaaagagagaaagaataaaaaggaaataattttcatggtaataaaataaaaacagactattggaatgtactggtcattgctcatgacattgtttcagatgttgagccagtctttgaaattatgacacaccctttgtgattatgttgtgaatcctggaaaataacaagttaactgataaaatagaaaaatctttaattctactatacattttgtaatattaatttcaaatgaaagtttggtttggatattgactacaatgtatttttcacacttgtctacgtttctcaccagtctgccttatttttgagagtaacagtgttttaaagatacagacacgaatagaatttgctgaagaaagtgtattctttgatacgtcgtgtaacagctgtataaatcaagacaaatgcaaattcatatgcggtagtggcaacatctaaatgcaaggaaaaacatctttgtgaactcaaatttaatcatcattacattatcagggttgtttctcaaaatatcccatggtgacactattttaattccgtttattactttaatagaaggattttaacaagaacgttagaaatggtaattttaaaataccttctttttagccccaagttactcaagtaatgagaatgtaagaatgagtatgaaactgatttaatgttgttatttcaatattcctttaaacatgaaatatgaagagtatttgaacttgcaaatagataagctttactaagtcatttctccattaaataattccctggcatttaatattgtacaaattaggtccccagaaagcaatgaatggaaattacaacgtgtagtaaaattttattttccagttattatggggaaacccttgctgcattgctccaaaatgaatttattagacatctgattattttagattatttgaatctggacagagatctccagattgctactaaatgtctaaaatattttctagttcaatggttaatctttttttagttgtaataattcttttgaatcctatgcaatgttggcagagtactatgtagagttttcagagccctatgtagagttaagaccaaaatacacctctgcaattataagaatgagctatgaaaaaataaaactattctagatatactgatttgccaaattgtcttttcccctttgtctccatcccaatgtttcattttggacatatcttgatctctctcttcctacttcttcactattcactcacatatcccatccccaccccaaaaaaattattttccaagtagtgaattcttgaaatgccatcagagtggatattgtgtttcatgaaatgtaagaaaaaactttggttaccattaggaaaacatcattcagttttaagagcacagtaaggatcatgcaagacagtgtgttgaaattatgtttgacttggttaggactatttcttctaacagtgcattatgtgctggcattttttttttgaaaataataatttgaaaaaatgttgcatcataaattgcacagttttttttttgcttggcctttgattttaagggcaaatgtagattgctttcttaattagagatttttctcagggtttcacatgattgaatatcttaaaatttaatatctgacaacctagtaaatttgaaatgctttgcaaccataactaaacacatgaagtacagcatatacatatgtaaaagatgctagccatcttttctgtttcttcaattctgcccatcagatctttccattcaggaatattactggcattctgattaaagtagtcatccagcaatactgaaaagaatggggtgttccattctcaaagactgtgggggtgctgagaatgctaaatatctaaatgtcattgattgctaagaatcccattttctgctctaaagtttcaataacatggatcttttaagcaaaatacctgaattcttttcacatttgaactgtttgaataatttttaaattttatttttaaaaaacagggttgcaggtgcctcttatctgataagagcatttctgctttatttgtcacttggcaagggacctaggtgctatctgctgtagctaaaatttttcttgaatttttttagagaaaattcattggtactaaagaatatgattgtccaattaaataaatatttaatggcttttaactgtccttatgttttatgcaaacatctaatctactcttcaaaacaccgccttattaatgtttcatctgacctttagaatttaattaattgcaagtatcataagtttgtggtagaatctgagacctgagaaagaaggctccttagtgtatgttgggagaaggtagactcagaagttaaagacctgggttccagatccagcattgctgctaatgcctgaataacccaagaaagtccttttactataccaagctaaagtttttcatctgcaaaatgaggaggttgatcaaaaacttagatctagtgatccctacggtttcctcaacatttaatcttttggtatgagaatataagtcacaactagggagttaaataataacttgtcttattcaactaaatttaacagataaagattgagtacaaacaaacataaacattcattgattataagtaaatttatcacataaaggttaacgagtaagtgatcaatgtggataatgaattaattatgatatacctcataattcacattttttattgtctgaaaaccatagtcacagcaacaatcagcatactcagtctaccccatcttgtccttaggctcagggttagggagctggatcagaatactgactcaagggtcacttcagagcttccctagcatggcaggctttcagaggtggcctgtaattatgaggaagagatgatttacaatagtccaggtttaagaaaataaggccctaggctacaacagtgaatgactgcacaaaagagtatatacagcagataatttcttttaatcaaatcagtagttcttggcaattaattgcatatgaaagggaaagagatggaggcccatatttggcaataaactttggagtataaggactcaggtctgggtgaatggaaaaatgatgacgatcaacaaaaagaaaaataggagaagcaggtcttgttggaaatctgtttctcttttgaggagccagtaggacgtttaggaactcaaaactcaaaacacctgggattagagtattagggctgaacacaagtacttcagagtcactcacataaaaatgatgtttattattatcaaaagtgtgtgctctcctactgatacgggggtgtaaaaaatgtgtgctgtgatgacattgagactcactcttcttggtaatgtcaaaataacattaattacattaaggtaccttgtctattttaagtagtttaatatatcattttcaactgtggttttttatggtttttataatactctctgtgttacataagaggatggtcactggtatcataagctgtagttgttgttgccaaatcttgcagctgaaaattgcacttagaagtcttcttacctgtggaactttgccacagatcataaggagacctgaaaaactatgataatgaaaggcaagtttacataaggtataaaaataaaattttgaaccattgaattgggtgcagtatctgttcatcactgtagcgttctacttttaagtagatttctctacaaagtatgctctcttaatataagagaatctctggaagggataaaacttgaaagaatccagtccatctacacagtgtgggatcacttctacaacatccccactgagtaactgtctagcctcagtaacagtcagccccctaagctctccccctttttcctcctatttttagggcttctgtatccaaagcagtttattctcctagtcctcttctttgcacttggcatgggcatggtattagatctagttaccttaaaacacctttctaaaatgaacacacagtaacgcaatgtgctacattcactcccaaaaattgtccttagaaaactagctggtaagcatatttataattataccccaatacaaagcacattcctgagagtaagtggtaaagcagcccccattttataaccacataatacaaaccactaccacacaatataaaataacagaatttgtgagctgcttattttagaacactgttttcttaacatatgctcgataagttggtaagaaaaacagcagtcctttctcattgttttttgttcccctgttctacaaagagacttcaaaggtaagaacactgtcatctcaacaaaggctgtcatatatgcaaagcaaatatcaatcacattttgccaacaagaaataatatgccaaagtatgtgtaagtgctacatggcaaacaacagctttttagctctcagagccactgttatatttatgtacatcttatctaaatatgcatgtatacttactaaagtgagtattatgataatagttattactcaatagctcccatgttataatcaccagtaagtgccagaccctttgcttgatgcttttgcaaaaattatctcatttgatcttcatacccacctgtaaggaatgtgccaatagtcccactttcattgatcactcaaggaattgaggtggacctcagattccagtctaggctagactccaaagccaaggtccttctttgattcttcactccaccttaacattagggttggtacttgaggcaatcatggtgcattttctaaattccacccactctttctttctcttactctctcttctttcctccttctttctttatcctcatttaacaaaccataagccttttttcaaacatttactataaaggttgcttctggtattcaagtaccctcctctacatcgctttcttttccttaccctttgtcctctctttccttaaacctgtcttattgatgagttttaaacataaaagtttgctgattttttcattaaaagcaataggattgcacagtttatatgaaagactctgtgattgttatttccatctatggtgcgcgtaaccaagaaaagattaatgtaggcatgagaatgttggaaaagtctgtaattttgcagttaaaaatcagaatccttctatgtaatttacaaccacaatagatattttactggctattgttatccagaaaaagttatctttatggcacttcataaagtctgttatttatattacttttaccatgagcattaacagtaacctccactctgaattcttgctttatgggtcttggtacaatgattttccgccctgaggtcacattagaatttcctggggatctttaaaaagatactaatgcccagactccacccttgaacaaataaaactatcttctccacccttgaacaaataacacaatctttggggatggtacctgaatatctacattgtttaaagtagttctggtgattctaatgtgcagccaagactgagaaatattgtaagagccttaattcaataatgactattgcagctaagcaaccactgaaaaccatgccagttttgggaaggctagacagacaaaatagacgtatgtggagtgtgattacaaatgagatagatgtcatttgaacaaatagtagtgtaaaatataaagtattctgatactgttgatcaatactctattgatctgtattgttgaacaagagtattattaaacttgtagcactgattggtacagacaagactgtctgatagagaattatctcagtcaaaagaacagagcaaaatgcacacaataggacacactagtgaatgtaacagatgctggcttcatagaataagaacacagctactaggagaggtacaaaccatgggggagtgtctttgctgctgagctatattgtgtggagggagtataaataggacagttttagaagatgggtatcagccatactcaaactttttttcaaagctacttaataataaacaactgtttttatgtcttaccagatgactggtaatgtgccctagagtcctccttgtttttagggaaaacttaatggttaggaaatacctaacgagaaataaatgtccttttcttttatagtttctacagttcctgactcactttagattgactactggtgatcactaaaacgactataaatagcacagttttaactctaccttaatgggttctgttttgcagtaggtcatttattcatgaacttatcatttctacttcactcctaatgtgctcttctttgggtagttatctccattaaatcgtgtttatgagtcttttttagtccatgaaggattttcaaatcttgccataaactggggaaagttccatgtaaaagtggggtggaagtctgggcttcctgacagacttaatcctgctagttaagggggctctttgggataatatgggttccaatgagtcactaggccaaatcccaataaccgcagttgccaaaagtaattagactgaagaaagccaggctccttgggaggaaggtcatcacagcgagctttagccattgctccaacgtcagacctagttaattgtccctaaggatggagagcaatcatgagttccagagagtaggaaatataccagaaaacaatgctttttcactaatttttttcccaataggttatttaccataagcgtgcaagagatggaaatacgtcatcagtatgtgcagtttatgtcactatcctcataaaccaccttgtttgcctgtgtgaatgtacgtgcccacatagagaactcccaattcatcactacaagttctcctcctcccttcctgagtagataaagaactcaaagaatctagtctaagttcataaaagaaggtgtctgactagcatggaaatggaagggaaggaattcttgtaaacatccttaggtcaacttaaatatcatattattgaagtaacatttggcaacaagaaaatggtagtacattatatcagacaagcaattctaaaatatctggagctagaacaaacttatgatttcttgtactgaaaataattcactttagaaacatggtgttgtaagtatctaagtagaaattatcaacaagtaagtggtgctataattttaagctttcaatatttgagaaattaaaagattgttaaacctttccctaggaaaatactcaagtagcacaaaagtattcttgctcaatacccaaagtaaaaatttgcctttgaaaccattggcttggatacccagaaaagatactccatcactttatgtaacggatctttaattgaacaaagacactgtccttacagtggtaagtttcaaattcctttatggttcagaatgacttcagtatatttcagcactcttttgagcttagactaccagttctcagtttaaatatgtggatgagtgatattgcttattttaaatctacaaacaggaagtcaaactctttttctggccagctttttctggcaactggaaatctccaggtatcatctggcagacaaataaaccctgtccttgtgcactgcacacatctaatagttatcatgacctgattgtcactatggccaatattgtggaacaatgtatttaattttctttcatcttaaattgacaataagataaccaaagaatagaagaatcctaattttggaaaaacttagcaaaattttttgctgtgtttacttgtaccactggtcatgtagtttctgccataaaatacaaacggtatggacaaatgctgcttggccacaaactgaggacatactgagaagctacatatttgtttcttatagaatttagttttgtttttcaatttatgatgagtttttttttatatggagtccaaaaggaccctcgttgcttgtttggtaacaaggaacaaggtccaaacatggtatccttagcccctctgactttaattcacacactctcatttcatgccatcctcaagatggtaattctcagtcccctccacaaagactgaatataattttaaaaggacagtctttctttcatatagcacatttctaagacatccagccaactttccagttctatccagagcttaatgtagatccaagcttttaacacagatcagtgggatttccttggaggccagttaggcttgcagtatcacatagatgcatacttggccctagtacaatcaataacatttgctatcatatccagcctgtgtttttaaacctgtgggcattatgtgaccataccccaaagtttagtttctaacagaataagggagagttgcaggaagagaacctccaaacaatttcatgctataactaccatcttcagtatccatgtggacatcccattgacattccaggaattcattttaaactgtttgcctctgaactgagtatgtgctctaaggagagcctacgatccaagaaaccttcatgtaacagtttttacccaaactatttaattcacaagctgttgggctgaagtgctctaggtcatcagataagaacacattcaaatgaaaattgccaagattttccagtgcaggatattttcgtcacccttcctagctcaaactcacttcctcatccactccacaaattctaaaccactactaagatgagttgaacagtcttaattttataatcttccaaagaaaaaataaagacacagacagccgagttaatttataaaacagtgctgcatttatcttggcagatgtcagttttccccccactagctctttcatgctgactacttagcaactcatggaggatcaagtcattcctatgtatcaagcaccttgagaaccattgcactgaataagtttggtgtgtctcttcacacacttcttgtacaaatttctttcctcatagacaatttatttactgggtctctgaaacctaaataatccctttactttaaacctgaagcaaatggagagtcatttttacaagagcaataaactaaagtggctgttcaaacactttacttgaattgctctgggcactgaaatacctttttgttaatacaaacccttcatattctagcaggaaaacccctgaaattctagggttgcttaaaattgtgtaaccaggaatctcccctctcccccaacaccagccccctgatcctgggagtatgccagtaattttgcaggattcattctgacaaactgttctggtgtaaatgtttatagaaatcttttccactagagattaaacaaagtttaagtaactgtgcctaaatgatagatcttagtagtgtttgcaacagcaggtctgatgctatctgatgcaaagattctgatactgtatactagagaaaaggctaaaggaaaaagaatcaagagaggagttagtatgaactgtatgtaatttgaactgcaaaatattattctaagttatctctatacagattagtttttttaatgtgcacaggatataagggaaatgagttcatttaaattgaaaaatagtaaaaactgactactcgtgctttaatggcttaaaaaaaggtgggggcaattacaaatcttatcacatgccagttcaaatgcaattcttggctagttctccaaattctcaccaaaatgaagtaacatatctgagatctgatctgatgtaagctctggtatccatattattatgattcaaaaactactaaaagggataactgctgagctctaagccttatattgaatattatttattaaaacagggtagtaccctaggcctcaagaggtgaaagcaaaccagtgttccctttctgtgctttcctgtttgcacagcattttcaagtgtttattatatactaagggattacacagctaagcaattaaaaacctcagaaacttcattgactgaatttcaaattaatgctacagcattaatgattcctgtgatactagactaggaaaggcatatgtcatttagactagttaatgtttcctctttcccttgatgatttaaggcctaccttaaaatttaagaacccatgaatcttaatttcatttctttgttggtaagtcacaatatgagatttcttcttaatatctggagattacttcctcattacagacataggatttttttaattttaagatttttttgtgaaaaaccattttagaaaaagttcaatgtaaataatgttaaaacatatgcaatggaactttactcctttttgttttgcttcaaacgtaatggcagtcattcactgctaagtttccagttgaatcctatttaaatactgtatttgctataaatgagcaaggaaaataatcaaaagggatccatggaatatgaaatagagactttataaacttaattggaagataatcctgtctttctaattaccttcttagaatctagattttcttgatttgactgtagtgagaaaaatcccaccttaggaggcagggacattgattttaatttatatattgctatataatttagacaaatcatttagtctgtgatttgattgtatccactatacaaatgaattcataatctttcatttatctgaaagcagaaaactgatcttaaagtccactcctccaacagtaagatcaatgagctttcccttttcatttttgtagcatgctctaaccttagatagttgcccgtccaaatgtctagaatgctgagttatggctagaattcaaaagtttaagtttctttttgcacattcatggaagttttagaccatatttttaaaaagctaacaaggcaaaaaaggaatcttgttaggggaaaaatatggaaaaatcaaaattgaactcagcactaactacaatatcatacattcatttatttatttaatagctctttattaaacaattactatgtgccaaaattacgaaaatgagcaaaacacacctggaacttacccttgtagtatttcacagtggttaaggaaagaaaatattaattcagattttaaaaaacaatatttggctaaagataaattagagcactttagatatcatttctaagccgaatagtacctcttttttgatttgtttaaatagcgttggaaattaattagtttacaatgaacctaatagctacccagatttttctctgggaaacagagacaaagctgaacaagaccacatatggggatgaagcaggaaggtggaaggaagattaactgaaaacatgggaatttattaggccttctggtattttcttgtcttaaaatttatgagcaatgaataggactcattacttagcatgccgtttgtgacaatcataggaagtatgctattgtccactttaaatgtagttagcatttttaagtaagccttgtaatggtgtggcatagcttggctgagtgaatttccatttttggcacattgactaatttctatagctgaactttcacaatagttcattaactggaattacttttcccaaacactaacatattgtatgttttaaaatagtgcattttttgtccatctctctgaagcattttcaaaccttttatggtaaccccatgaccaccacataaaacatacaagtcaatctacttaaagcaccagtttggcaaatatatgtcaacaagttatttggattcttatgtaactttgttgatgacctttcctaacctcagttgatagctttaaagatatcagttgccaaaattcagagtcttgaaaataacttgattcaattcttttcggtatgtgatcactgacttgtaaaggtctttaagtaaagaaaggctactaccagctacttccacatgtttatctcatggaaccttcacaacaatttcatgagatattattccattttataaataaagaaattgaggctgaaaacaactaaggaacagatcaaaatgacatagtcagagatggtaaacctaaactgtacatctagatcttctgacctaatgaatagctttcccaatacaccctgcttttcattaagcctgtaaaagagaatgccagaggaggtttaaatgagaaatagttatctttgcaactgagatggaactactaatacctcattagacaaaacgtgagggtgtgagaaaataaaccagactacttgacagaatggttacttaggaagtgccaggccaagttttttaactgtttttaaatcagaggcccaataagattgcaactattggccaggtgcggtggctcacgcctgtaatcccagcactttgggaggccaaggcgggcagattacgaggtcaagagatcgagaccatcatagccaacatggtgaaaccccatctctactaaaaatataaaaaattagccgggtgtggtggcacatgcctgtagtcccagctacttgggaggctgaggcaggagaattgcttgaacccaggaggcagaggttgcagtgagccgaaatcgtgccactgcactccagcctggcaacagagtgagaatccataaaaaaaaaaaaaaaaaaaaaaaaatttacaactattgttcttaaaagatccctctgattggtaatggtagcagtagtagtagtaggaaatgggaagatgtgaactctattaataagggaggtagaatctgtaagaaaggtgattggagaagaggataaggagggctcctagatttctgattgtagcatcttcatggcgccatttgctgcaacagaaaagcacatgtcgattagatgtagtggctctcacaggtaatcccagcattttgggaggccaaggagggcaaatctcctgagtccaggagttcaagaccagcctgggcaacatggctaaaccctatctgtacaaaaaataccaaaattagccgggcatgatggctcaaacctgtagtctcagctactgtgggggctgaagtgagagtatcacttgaaccctggagtttgaggctggagtaagcagtaatcatgcctctgcactccagcctaagcaacaaactgagaccctgcctcaaaaaaaaaaaaaaaaggcacatgtcaattaagtgtacaatagttttaatagctaggaagatttgtgtgaattatatatgcagcataaaccactcatgttactgaagaagataaagagagaccagagaagtaagtgacttaattgaagtcactttgcagtggagccaagagtagaaataactcctgtagccattctgtaataccaaatgctacacagcagatggttccaagggttgaccttccagagaagggctctatggatcctctgccaatctgatttcttatgtgtttaataatggccttcttggagagaattatctgttcattgactgaggagttgcttcacagtctctttatttccttactccaagatatgccaaactttaaaaagttacaataacctgttgccctaaagtaagatggctcatgacaaggcacaattttaaaaaacaaaccaattacacatgccgtactctcatcaaacacagttatccatttcctcatcaaacatattctattcctgggaatgaggaaggttcaaatctgatcctgagctggaaaagtatcattttgcccattatcagcaataacttatattaatatgattttgtacagcatatagacactttctcatcgtcttatttgatttttttctcaacacccttttggaatgggcagaacaggtgttatcatactcatttcacaattaaagctcaaagatggtaagtgatttgtatggtatcacaaggttggtaagttgcaaaacttagcctcaaaggtcttgtagggggatagttgttttgtttttctacagttctatgacttttcccacactaccacagttctcatatatctaccctgaagttcctactattagtataattcctttggatttgacaagaaaggcatgtatattagaggaaatctttattatagatgagagtcttactagctgacaatgtgaactggcagatctttaacgtcctgtcccatttgaatacccatgaatgagcttattgtggggagaaggagataccgaagcaagagcatcaagcattgtttggcaaactgtcttcaggaaaaagcagaaaacttgctgggtattctctatggtagtagaactttctgagagaaatggttgagttttgatataatgggatgtttattaataaatgtcattatgggctgggcacggtgactcatgcctgtaatccagcactttgggaggctgaggcaggtggatcacttgaggtcaggagttaaagaccagactggccaaatggtgaaaccacgtctttcctaaaaatataaaaattagtcagccatgttggtgtgaacctgtagtcccagctacttgggaggctgaggcaggcgaatctcttgaacccgggaggcagaggttgcagtgagcggagttggtgccactacactccaacctgggtgacagagagagactccatctcaataaataaataaataaatatcattataagataattgtatgggctttccccaagtatcatgatatttgttttactagacataatcaagtagactgttacaggaaagcagtttgaactagatacctctaaagttcccaaagtttatgattctattggctggaagctgactatatggatctcaatattctcatctgcaaatttaagggagaaggaagagcttcaagagccctttaaattccataggtaaattcaccatcctttcagatattatgtatgtattcctacataaagcattttgttcataacattttccctccttccccctttccatttgtctcagtttttcttttccttcaagttccataatcattcctatctgttctctgtagtctttagatatctcaattatcaataattgctcctgccttttaatttgcggcaaaaagtttctaatctatacatttatgggttttagaatattaaagtattatcttattaattgtattgtaggcttcttgagtcagagactatcttttgtctctcagtatgatcagtacctagaagactgcttccagtaatcattgaataaacaattatttgtgaagataataataatgtaatactgaaagtgtggtatttatatcaccttcgtcagattcacctgggatgcttcttatcaatgcagttacctaaatccactggattcacttccaaatcaaaatatttgggagtggcatcttacctcatcattgtaaacaagtaatccaggccatttttacacacagtaaagttttagaatctttagacctttggtttctctgtaccatatagacctttggtttctcggtaccatattgatatcatttctatgccatatcttacctttttcagtctgtttaagtaggtgtgtatcttcagtgagcagctagtgcctcagaggtcttcttgacccggatgtctgtgactcctattaaagtctgtgtctatggtacttaaaaagtagccactctatgactgttagtgagtttctggttccccaagcttctcacacctcctgtattagaagcctcagtatgtatcctcttttctaagagttattattggataaagctgccagctgcttcaaatatggatgatgataacacaggatgagtttagtgcctcttgagttaaacaaagtgtcttatacctatgattttgatgattgcctaagagagtcctaggcactttacacagcatctcacttaatcctctcaaatacatatcaagcagatattctggtgttacagatgaggaaacctaggctcaaaaaagttaaacaacttttgtctaaatatataatcagactggaaattcatttacacagataattggttatattcatctttgtatgctcacctactagaacactgtgtggatgttgaataatttaattttttaaatgaataactggataaaaaataaatattggtaactcagctagaaaacatgacaactagggttcaaaaccagactctaaatgagtgcagatccagtacctcttcaccctgtccctgtgctcttctgggaagtgtgcaggacccatttctgaatgaggtcacaatgcagggagccatgcacataagtataaagatgcatcatacttacaaaggtgcatgtatattcttcttcaattccgttagcaattggagccatgcacataagtataaagatgcatcatacttacaaaggtgcatgtatattcttcttcaattctgttagcaattttgtgaatctaggaaaaaaatcacttattttccttgctcagaattttatatgtgatacataaagctggagtttttaaaaatggtatactcactattggtacatcttctagtgcttgttgaaataccacaagtctctcacttgctgtttacttatgctaagacctcagccatcagatatgctactttagcatgctatgtagcacaaatatccaagtttattcacaatataacaaagtggagtttgtttttagcacaaactgaagtttgtttcattcaagaatgtgaagttagtagttatggagcactcatgcggattcattaccattaaactgtcacattttctgtttatgttgatttctaattatttctaaccttaaaaaaaatatatctttttttttaaggttagaaaaaaaatatttctaaccttaaaaaaaaatttctaattatttctaaccttaaaaaaaaatggaatgcttctctcagccagaccacagcacataatgattcccactgttggatgaacactgttggatctgtcttatgaaaaacgctgttattacctactaactcatcaataggtcctggctctacagaatctgggtctcatcaccctcatccaccccctcttgtcctctattcacctccacttgggaacatggccacttggagaaggggaagctttccctctcttagcaacagctggggatgttgattcagtaccttacattttacactcgtagcagagtgcattcactttacaaaggatttttctacttgcgattaggaaaaaaaaacacctctttatttttggttctgtgagtagtttgtaacagtttcaatagcagcatcaactgtagctagtcggttggtcacaggaaagttcatagggtttttactacttttgaagtatccaatttgaaattagtccatagatttttaattcatttaaggaattaaagaacataatattaagatactaaaagaaatattaaattagaagtaaaaagcacagtgttgttactctaagttatttagactgtttcaatatgcattgctaatggtaacaatttagaaaaatacaagaaaagattatatgcaagactgtaatttttttgctttttattctttctttgttcttatgacctttcatgtatttgataacttttttacttctccccacttattcccacacacacacttacacagaatgaaaattaaaatcccaaagcaaactaaaattactgctagagaaagatggggaggaacagaggagaaacgagatagtcccaagagcaaaacacatgtagattgatgcacagcctcttcaaagattggaatctggatgtaaatccccaagtttgttgctagttagaacattttcatctaatatacaagttaaaaagagaacatatcttcatggaatacaagatgctggttctgttccaagatccataaaattaacacaaattaaagtaactatatcagacaaaatgtgttgtttcctttccttctaatatttacttagaaatgcagaggctacatgtacttaggctttttactctggccctcaagggatgggaggatctggctccaaccaccctttgtaactcattttatagcactcaacgcattgcagcctcattggtacctgtcatgttgctccttgtgcccagcttctcccatggctttatactgtttgcattgctggtgctctacctgaaatactcttcctgggtttacataatgactcctccttattctgcaggcctcggctaaggagtagacttaaaggttcttccctgacatgtatttaaggaagtttcccagagttattctctgccttattcatctgtttgttgccttaacaacactcattacaatctttaatcatttgattccttgtttacttacttattaactgatgaacatcatgtcttcaggaactggatgtcttattcattcctgcctttcctgcatcacatgaaatgttgagcacactgtgggtgaaatttttgttgaaaaccttaatcatagtttccacagtgtatccatatacagtgaagcctacttgcatctatctttcatttctagtcctgattttggactagctgtggttaggcaaagcatagccttcagttaccaggttggctttgagctcccaaatattcatcatatcttagatttcatgaattctacagctaacatcatttgctagccattttcttaatattttgggctgacttgattttagtggaaagcctagctatttgctgcttaatgttaggtttgttttattgctgtggctttattttaaagtatttatagaatataaatattagactcccttcaggaaattattattcagtaagagaaaaagaaagattttccaagttctcaaagaaaccatttccattaaaaacagtatgtttccccacataataataatggtggcgcaccaactgggctgtattcagcagctggtgaagacattcctctctgagactcttaggaattctgtcaacctctggtgtaggcacagactttcagattagatgttgatttagtaggataaaagatacagtagactctattatcctagctgttaaagttcaattaatgtatgtacttttgagtttgacgaaagaccaatagaatttgtatgtaggtgtgtgtgtgcatgcatgggcatgcatgcgtgcatatatatatgtatatacacacatatatgtgtgtgtgtatccatatacacatgcgcagacatacaaacacatatgtgcacatatttaaatatgtatatttaaatagcataggtgaattttaatttacttaatggttaaaacattggtatattaaaaccctaaaaccatcagatgataaacagtatttcaaaaatggcagggtctgtatatatttggacatataaacatgtggttctttcaataagttatcaataaaaaataataatgaataaacctgtattcacccaaatatcatagtttgataatccaaaaggagtgttgtatccaaataagtaattatatttattcagaaaatcttgtgttcatattttgctatctatacctaactttctcaagttgcctaaatggttgtggagacctagccattgtcggctctacttgcaagctttaacacatgaacaaatgagaaacactgactctgaatattttcttgggttgactgggcagaattttagagagacagccaaataattcaaatttttaacattagacttttcttaaagtgatcgttgccaccagaggaatcgggaaacatctcttaattttcaataaatgtaatattactccaaacttaaatgtgacttcgtactaatcaagtcccaagatatggtagaaatgtgttgtcctaatttaggcaagaaaaatcgccacattttctctaagggaatgaattactgaagtaaatgacacataagaaaaccattattacttcactttgaatgattgatttcataattaagcattcaaagtttatgtaatttgcaacatgatttctttgccagatattcataggcatagcccacttaaattgttatagatactttctgttaaacatttactactttaacatttttattattctttctttctggttgttttttttgtttgtttgtttgtttgtttttgtttttgtttttttttagacaaggtatctctctgtcatccaggctggagtgcaatggtacagtcttggctcactggagcctgggccttctgtgctcaaggatcctcccacctcagcctcctgagtagctgagaccacaggcatgtgtcaccgtgcccagctaatttttttttttttttggtagaaacagggttttgctgtgttgcccaggctagtctcaaactccttggctcaaggaaagtgctgggattacagttgtgagccactgtacctaacaacatatttatcattttttaaaaaaatagcttttttatatgtattgtgttcattccttcaataatcaaaaacactttattgagaacctattcaataaatagcttccttgaatagaaggtgggaattatctcaaattcctgaatctatagaggaaaaaagaagaagaaattatcaaaccatgagacctcttccctcaggaagcgtacagtcaatgtgagcacacttctaaaaagagaaggcatggaagaaaggacagatgtaaaaaaaactttgattatagaattcagttggtctcttctctctaccctgtctcttaaggccactgcatacagaaaaacaggcagtgaatgttgtgcagacaagtatgctttggagagattttatatatgatgtttttattgttgttaaaaataacttagatcaaatttgtgaatttattaatttttaattagattataaaatcattattacttttatgtatctggcacttcttttcaactcagtcaaacctgttttattagtctaaagtctactaaaatttacatttctggaaattagctacaaataaatgatcatcagcagtaattggcagcatgcaataatggatttttttcacataacaacttacaatagatgttagtacatttgtaactgagctttagaagtgaattaacgtaaagcaaatgcttgaagcttgcatttaaattgtcacagaaacagaatttagttcccaatactgtattagttgatacatcataaacattgaaaacaagtagccaaaggttgtatattgaccaagtgttctggttccatttaaaattctgtattctggatattttatcaaagttgaattaactcttatgataatagcaagtctcttaggaatggttgcatcagttatgtatcacaagttaaaggttatcaaatagtaggaagccttcttaacagatagtgaaattgaagttttttactcagggaatgttgacagttcagacactgaaagtaggtttaagttatgtatcagtgtacaccctttttgtacaactaaccataataaacaagttaagaaataatagttccctctttcttaattctaaagatagacatattaatttcactgtgtatgtgacacatttttagtagaaagtcccaatttaaagtttccatgaattctgcccattttcccactcatatctacccccattacacatctaaagtttacttatatataaagatatagttaccagatatcaaagatctctattttcacctctgatctaaactcactatttttccagcaggctattcctttgagttcaagtttgaagtttcaaaataaatgattatgatagcttctacttacttgtatcataaggcaattaccacagttaatttagcttttgaatatgctctgaaagcaacagtgagtgacctagaaattcaaagtattgtttaaagctgcttataatacattttgttctcttaccaaatgtcccctattttgcatgatgtcttctttttctgtaatttttcagtagcttccccttgttttttttttttttttttttttttttttcagacagagtctcactctgtcacccaggctggagtggaatggtgcaatctgcgctcactttaacctccaactcccaggctcaagcagttacggtagctgggattacagacgtgcaccaccacactgggctaatttttgtattgttagtagagacggagtttcaccatgttagccaggctggtctcaaactcctggcctcatgtgatcagcccaccttggcctcccaaaatgctgggattagaggcgtgagccaccgtgccaggcccagtagctcccatggcttttctaattaagtagccaccatcagagactcatgtgtgcatctccaacagccactccaaagtaagctccatctattaagcatcactctctggatatttcataaaatctgcaaaattaatgattccaagccaggtttatctttttaaacgtcagtattctatgcaccatgccctactctccaactgcaggcttttactcccctggtagcccctcccctctctattcactggctggacctagaaacccaccttttcaaatcctctttcttgttcagcctacatgccattggccactatatttggttggtaccacctcctaaatatccttgaaacatgcatcccttcctcactacattatattgcctctgccgtactttaagttatcatcagcctcttaccttgactactacattattcttctcctagtttgcatgcctgccacactgccagggaaatttcctttccaattcaaatcttaaatttcaatcactggtgtgattgaaacaccctatgtttacagaagaatttcattggcctatctcacaaaagtttctgtaatctagatctattttatacttccaatcttcttgttattccttatatcttcattccccactacttatgcaccagttgcatcaaactcatgccagtctccttcccagcttgggtcactgtagtgtttccttctctagccaaacatggccacttacatactcataaactccaactcattttctaagattaagttcaaacactgagattctgtgaaactttccctacctctccaccaacaacttcaaataatagtaggaaaatattgtttgaaaaaggtgatttagaaattcaaaatgaagttaatattgaatggggaataaaaagaaagacacatgagaaagtaaaattctattttctgtctcagaatcacaagattttatggctgaaagtgttgttacagtcaatatagaccaaagttttttgtggtttccatataaaaagtaaaatctcttgccttaaaatgaagtttgggaaatttgtacttagttgtgtaatactgactgtgtaatttgtatgatccttatacggcattcaagaaagctgtcactacactacataaccataaaaaaaatctagactcattgaatctgagcttcatagtcttcatttctctctcttcccacagccagcatttaaaccttcctgaagaaataaggtttgccatcatttgatattcaaaattcattgccatattcaaaattcactgattaaaacataaaattttattgcaagttgggacaactaggtctttcttgctttttcaaaaatcaaatttttaaaaacccttgcctaggaagtcattatatgaaaaaaaaaaggtaaaaagaattattgtagcacaatgttgactgtgctccatttcatcagtaaaagttttagagacagagggaatcaagcaaggtattttggcacatctcataatttcagtggatacagttacaatcatgagacttattcaaagctctctcctgaagaacattccaaacattcaaaacctagtttttaaaataaaatttatcttaaggaatgtcagtttttgaagctctgaatatgtaaatcatgtttatattaataattgatatatttaaaattatatcataattggcaaaagtttcagaatacataaaattagaattttgtgttttctttcagcagccacatttcagagatagggatggattggcatggaccaatatggtccatctttcttaaacccagagtctcttagtgccctgagtttgaagcacttttctttcaagttgaggtccactcttctatagacaattctatgaaaaggtcttacaagtttttatctacacctctcgcttcttgaaatggataatgatagattccaaacacatggaaatctcttgccccttttactttttaggatctttgcaagcttacaatatgtacacgttttctgtaagtcaccaatgctgagttactggcatgaaaaatgaccctgttacttggaaagtagtttcacttacaagtcccccaggccctgtaatgtctaaacctcctgtgccactttatgtgactaccccacccccacagaggagcatgcacaggaaaagcagacttcccttcccccacacatttccttagtttatttacaaaacgtcttggaatgagaatgagctgcttgtggttcctgtggctgattcagggatggtttcctacaggcagaggatgctggtcaaccgaatgacctctctgtaactaacccgtgcacccctgtggtaaggctgtttggtcttataggtacctcttctaactaagcttggagggatttgtttttgtggtaaagaacttagtaataaccaaacgtcactgtaaagacagatttaataatgttaaggtccatcagagcctactccttctactaccaacaagagaagccagaaatacactgggatgcctttagattcctgtgcatcaatctttctttctctaaggattatggtttttttttcttctggcatcttcaaaggacaataaagctattagcaatatatttgagtggagaacacattaggaaaagaaatcatcctaaacaccagctatatgagaaacatccgttagtcagtagtttttaccagctcatgcagaggtgatgatgactatttaatagtcaaaagaagatttaaagttgtgatgatcttaagcaaacatgagtctcccaaatattcatttctgtttgttcagacttgctaatgaacactcttaactcacacactggtaactcttggaaaccctggaatatgtgtaacagtgattcttaaggtagactggtccattctcaccaaatatacatttcactcgagtaagtagaagataagggcacagaaactgtaagactccagttccaaaagagaaaatattgaacataaattaccataagtagtcatatatgatccacatggaaacactggtgagataagcatcacattttcaccattatatctatttgaactggcaattattaagctcgtgtgagaagaaatatttaatgaaggaattctggggagctcaacagctaacatagcttcagcatcagtttgcattggatcaaaaagtaaaattgtgttctctaatacaccatagttcaaaacagatataaaacttagtgtccttactcaagttaagccctaatgtacattattttacttactgaagaaattagaaacatatgcttatcctccattacataaatgaaaagcaaagcaaatgtgtattaatttcactgtgtaaatgagcacaaaattaccagtccccaatctcccagggtgctagttcagtgaggatattatatatatgaagagaatatatataattagttatacataatttaaaaatatatattatatgataaagagactatgtatacacacacatatataagtcctttgaggcagtatattctttatttttcaaatgctcaattttaagaactttgaaattaaaaacaatacatgtgctaaagggaaataaaagatcataaaaaaagataggaaaaaaaatcccacctcattcacccattaccaacaaattgaaagctaatgaaagagaacatatatcctgcccagaaaatgtcatttttttatctgtgatttaacctttgtaatgtctttctacatttgtctccacagtgcatcctaacgttagtcaaggctgccaaggaggctgtgcaacatgctcagattacaatggatgtttgtcatgtaagcccagactattttttgctctggaaagaattggcatgaagcagattggagtatgtctctcttcatgtccaagtggatattatggaactcgatatccagatataaataagtgtacaagtaagtgcccacacgaaattgtatttttatctcatctttggtgacttttccagattgaaatggcctctaatatatttgtgatattcaatgttaagtaaatgataatgtttatctgataattaggctaaaccatacttggacttaaccctcagaaccagaaaatttttatcactaacttacaaaaaagcactcatgttttggttttctttttaattatgaaagcaaaggctgggaatatgattattgctcattgaacctatagaaaagtactgcaagcctcaattccatctgagtttccattatcaacacaaaatccaagtattgactaacttgccaaatcatttcagctattttgacttcaagagagattccagagcaactgaaacatttatttatcaattggaaataaatattgggagtactgtcatctggaacctgaaaacctgtttttcacactgcagacccagggacctttctcaaaaatgtaaattaggaaataccactctattcaaataccatatgtagttcctccaaactcatctcctacaactccccctcacccattttgcaccagcctcacttcccttctcataagatcttcccacctcaagcctttgcaattgtgttctacactggctgttctagcagttggaaagctttttgtccacatctttgcatagctggctgtcttatatcattgatgattttgctcatatgtcaccttctcagagagacattccatgatcatcctatccaaaataatcagcctgttccccttgtcaaccaccctccatctctttttcccaccatttgctgttgtttttttgttttgttttccagagcacttatcactctggaactagactgcctggtttcaaaaagcagtctgatctgttgtcctgggttagttttataacttttgtgagcctcagtttccttatatgtaaaatgaaattataccaatgactacctcattggattgttgtaaactttaaataacttaataatattgtaaagcattatagcaatcctggcttacagtaatcaccacataagggtgaactattgttattgtttactgtatctcctctcctaggatgtaaactttctgaagcctgactcttacccctcttgtgcattgctgtcaaccaatataaaaaacaatgcctggcacatagtaggcaatcaaatatttgttgtaagaatcaatagccctcaagaacaacacaaagataatatcctttgtatgttttcttaaggttctgatgaaacattttcactatcacttaatataaacagatacttcatcttataaatattcttggagatatatatatatatatatatatacacacacacaaagattttttcatagggcaatcagtacaatgattttaaaatcaataaccaatgtacctcaactaaatcactgtggaggaatcgtgaattcagtctggcaaaataattttggacttcaggtgtttatttgatactaaagttgtgtgtggctgtgtctgacacatgtagaactggaccaatagttaagagaacataatgcaagcatatttctttcttttttctctttcagaatgcaaagctgactgtgatacctgtttcaacaaaaatttctgcacaaaatgtaaaagtggattttacttacaccttggaaagtgccttgacaattgcccagaagggttggaagccaacaaccatactatggagtgtgtcagtattggtaaggagaacctgtaataatttgagtaagtgataatgtcagtctccatggaggtgcttttcaaagtcctttgccaaaagaacttgaaggttcttgggctgagatctcttaaaggctgtctccatccttctttacaaagatactctcttaaaggtgtttttcataaccttatctagtatgtattatggtacaatttaatacagtaggtgcttccttatttcttagggactattgataatcgtttcaaccattctgtttatgatagatttatttttattatttagtgaatttttatttaattatttaatgaattttatttaagtaaacattcagccaagacacacatatgtatatctgacagtgatctgttatgtgacatacatatatgtcttgaacttaatttttaccttagagcaacagtttcataaaacacctaggtctaatctcaactaatgaccaaagttattttccaaggtgggaacatatattctcttgacacagcccattaatgctcagtaaatggatcaaagacctagagaactggaattgatttagttaaaatctcactctttttctctcatactgctatgctgaagtattctgcttgcacaggtattgatacataataaaaaggattgtggacttactcaaactgacagattgagacagtccctggggctgattaattgcaggccaaatttcctgaaggggaggtccctcagacaagttgtttgtctaagtaacagatcactgtcaggctgtattttcaatcttttaaacgttgtgcagctactacagctacaactttgatgaacacttgggaagcagatgctgaaccaaatggtaaaatagcctaggaaatctcaaaatcccctgggcaagaactacaggaacctttgatgctgcggtgatgttggcatatccacacaactgccctcctgattcagtacaagatagtctccaggactcccctggagtccccatcttaggggtcccttagaatctaaagggctggagtaataactctaaagtgatggtttaaccatttcaagtgtaccgtagcacttttatttctaaacaatgttcttgatagaataaaataaatagatattttaaagataattttagaagcatctggaaaacaacagtcttgaaacagttcgtggctcattttggttaagtttttcttctctagttgtaaaaacacatggaaaaaaaagcaacttaggaatagggtaaaaagtacaaaagaaagcacttcaagttctttttcttataggtcctgagggctgatgattagaggtaataagttccaaacactggaaaaaatagaaaacacgtctgtggaatattcaagagcagaaattcaggatgagttgcagaatgtttgtgacatttctctacccagaaaaaaggcacatatttagattttttcagttgttgaaggtgtaacattcagtcctggaaaggctatttaccttaaatgtattaatgcttttctgtcagggagatcatttcacacttggcactattggatttgcctttaaagcttactggtaatttatgctgctagtaagactaagactatttatttcttaacacaactacatttaagtttatatattttggaaaagaggttagcagtccaaaggccaattactgagtttggttcatttaacagatgcaaatgacctaggacactgtagtaacacaaatcaccaactttcattcagggctggctccggttgtttgctcaataagagatgtctcccatcatatggcgcctagcctgcaggtactacacctgccatgcctttaggccagtccagaatttcagggaagatgatgacctgcttctatatcacaaaggaatattaaagcctgttcctttaacaaatatgaaaactaggatccggagagccaaaatggtgatcccaaagaaacattttaagttattttcagtgctgtaattagtagcctgactttagcttcccactactcatccaatagaaagaatgtgtctttctcattgctaaaatccacaccgtatttctacttttctatcgagattttaaattgagaggaaaggtcataaacagaggaaatgctaccctgatatagagctgggatgaaagaggtatgtcacagtgtatctgctttccatggtttgcaggtgaaatgaaacagaaacatccactgaaccaaattttataagagaacatattcttttcactttgtgctccagatatttgcttcctttctgcactgtcattttgtcaccctcactgcttctcttagttggatttgttcaagaaacacagagagaatatatctcacttcaaggactgagtagcaagggacattcccttgctatgttctctatggaaccatgcaactagtcaacaagaattagagcaaaatgaccagtaaagtcactactaataggacatcctattcaactttcttgccaattcgggaatcccttttacagcatcttgcactgatgatcaaccacagcacaatcattcccagggaccggagctcattacctttatgagacatgtgcttcatttgcttcattagtgaatagctaaagatttccagttttaagattgttcttaatacagaagctaggaggaacacagaaggtgaatattctgtttttccttaactatctcttaaccaaggagtgcctcaattctacattgttcattaaatgatctgaatagaacctaaatcacctttgtgttgtctttagcacttttttttttcagttttcattttttttagtggaaatattatttggatgctaacattataggtttattctacagtgtttctctaagataaattcacctcatttcatggtgttttaactctctggtctcattagaactttttactacctaaactcattagttttgaatattttccctcctccaatgaaactatctaaggttgtccgtagaatttaatttataaaacctttcatcttctgactataaactaataattacctaagctgtaattttttaaatacgtttttctaatgtccaagtgtacatttgcttagaccacttttgctattatgaaagagcaccgaagttctggtcacttgcacatcagatcattttttctaattcagtcctcttaattctggaattaaatgaatactggacaaagtgacagctcacaaacatagactttcctcttctcatttgcttttttggaggtgcctttttttgtaatcctaaggatacactactttttaatgattaatatcagaatgggatgctggaagataatatccataaccagcaagagattataatattattaattgacttagttactctattcttgaatgaaaattgtagtggtataactgagcatgaagactattttaaaatggttcaataaagttcatttcatttcacagaaacataaagtcatgtatttaatcaattccatttaattccgtgttgcactcagggacctgaaagtgtctgaaaagtcctgtgaaaaatgtataataaatggatttaaatttctaaaacatttaagttatctttcagcctctgctgttatgagatagcattctgctctaaagtaaggaatcattaaatcagaaggcaataagggaggttactggaaacttctttttgtggaaagatagtcttaaatcatctgaaagagttactgttgctagctgttgttatacattagaaagttttagggacataaatataatagcaccttgagatgtttcttttctttagaagttcaaaaatctgttacaacctgagaaagccgttattgaaaaaaagaaactaatacagaaaaaggaaacaaatctccaaaagaagcttcagaaaaagtacatcaggtcatcttaggaatcacttggtcaggttaattttagaagcaggttatcagctgaaattgacccagaattcacatataatagatgccgctatgcctgaaccatactcagtaacagatatcaatatttaagcgtacaacagcacatgtcgtaagcaaaggcagtaaatagtaggccaaagacctggattcattttctgctcaagcattctctaacacagaggttctcaaaaggagttcccagtacctgcaaatcagcattacctgtattgttaggcaaattcacagccctgccccagataactgaatcagaaactctggtgggggctaatggagaaaggtccagaattttttgttttagcaagccctccaagtgattctgatgcatgctaaagtttgagaatcaattctctagcacatagtataacaactgttcttcaaattctggtcaggatcaatcaacaattgcagcagtgctctggaaattataaagaattgatcaattttagtgattatattaatgttagtgcctgtgttaatcaatctagagaaaaaggaaatccaatgcaaaaatgagtttacctgataatgagtactaaactgaaaacattcaatttctgcctttcccattctcctgttttatatttaagtcatcttgcccgactttgatctgcaagattcttctcaaatgtgggcaagttctgatggaagcaaatctttttttaactcaacaatagtgaaagtggttgtaagccagctgagtctgtttcttctgttctgtttcagtgcactgtgaggtcagtgaatggaatccttggagtccatgcacgaagaagggaaaaacatgtggcttcaaaagagggactgaaacacgggtccgagaaataatacagcatccttcagcaaagggtaacctgtgtcccccaacaaatgagacaagaaagtgtacagtgcaaaggaagaagtgtcagaagggagaacgaggtacaatcataataacaaaatgtgcttgtttgaatcctcataatctgttgcatttttcattttatttcttatgaaacacttggcattatctttcatgcctaatatcctaaaatgtgtaccaagcaagaatatgttgcttgtaaattacagaatatagatgtggtaattccaaaatatggagcctgatgtcagaactttactatagaagtgtgctaattgaattatgatgaactaggctgtattgtaagcattcagggcattatctgtactataatctgctttgctagtacttagaaaacttttgggaagtctcataattacaaagtctaatgatatttacaagaacaagacaaagaaacaccgccatcaaacattcctttcctcactgcctgcaaaccaaagtagtgaaatgtagtggtaagcttttgtagctaagtgtatatatatatatatatacacacacacacacatatatataaaattaaagacagaatatcattctgtcatccaggctgtattgtagtggtgccatcgcagttcactgcaacctcaaactcccaggctcaagcaatcatcccacctcagcctcccaaaatgctgggattacaagcgtgagccgccatacctggccagtatagttaatactgactttattttgaaatgaccaagaccacattttatgaatatagcaaaatcattaacgacatttgtctccagatttcttttcatattgcatatttcttttcatatttcttttcatatctgtctccagatatcttttcatattgatttcttttcatattctggtctttatagaccagattacagaacctattccatcaatattaactattagaatttgctgtgaaatcaacaaggagaaatatagcatttaataatatgatcctttagggtgaataaacttccagccagaagaccctcagttgccgatctttaaaatatcatttttctatctttctcactaatgtattcagcaccacttcctacaaatatgttgtgtagttttatgtaactattggtagttatctggtgagtctataaatgatcttctcaattaattccaaaggagtttgattgcctctgtagttgacctttcttatttctccatagttgacctttattaggttatttcattcatttactagcttatttcattcatttattcattcaacatagttttattatattcttactttatggctatgcactgtactagggcctaaggattcacaactgaatggggtactgtctctctattgtgaaggtacaccagagtccagtgaaaggttgagatgtttaaacagataatcacaacatcgtagaataagggagattatagatgtgtgaactagtttaaagggaacacagaagaggacactgcaaacttgaacattgcttatacaaaagagaatttgggtcacctgtactttgcaaagaaacatccattatgccaaaagaattggccatcactaaaagctataaaacctgtttctgccattctaatcaagtagttaatgtgaaaaaattcttgaagacatgggttatttaaagagaacttcaaacttttgtaaatttgtaggaggttttgattaaaacttagtttaaggaatgaaagctggctagtgaaaaaggccttttggcatttgttaccaattaatttaaaacatcttagattttaaaagttggatttggaagtcaaatatttcatcactctacttgttggtatgctcctgttgccgtacatttacttatgtttactaaatttccttaaaatttaatgacttacaggtggtctttgctcatatcattcttttcacaaagattgtacgttattaatcagtattcagtacacattccttttaaaatataaatgaagaaaagttatccaatagcagaattaaatcacgattctaattacattttatttcttttacttgagaatgtgatctttcaatagattatattttggtagcacttgacttaaacattgaaaatgtcaactgttaaaactggcatttatctcatctagaaagagataaaataaacaacatcacaagaagtttgaaatagtaacctgtgacataagatttagcttaaaagtgtctttctgatttgttttcttcccctctgaggatacagtgacattttacatttacaaagagaagtttatacaactagaaaatgtaggtgttttattttttcaaatttcataaaatgtagactaacaagtggcaaatatgaatcacatttacaattaatttccagatttagtcctacttttattttttttcatttatttttcaaggtgtttgtcaaaaacttttcttaagtagcctataaactacaggtaggaagaaaatcatttctctctttgttatttctctaatcctccagttttcttaacttctcttaaggtttagttagcaagtatcctatttgaacacaaaccaaatagaaaagtaatagtgacctctggacatcccaccgtatcctctctatcaagcatcatatcaaaataataacatccagagtcttcatttaggctctactgtatatttatataatatgtataatatataataaaaatatcttgaaaattactcattgtcttgaatttataacctaaatgataagaaccccacatacacatatagagaagcatatcaacagagcaaatttagtagaggactttatctttatatttttctataaaagttggcatttcttattttaagtagggtaagcattagaaacatttaatcaactttaaagataaacacaataaagtggtacagacatgacttcccctcacacttaggatagctattatttgagttgctcccagatgtttatggattaataaaataagaagattcctttaggttcacagcttgagcatttcaagatgagtgtactaaaagataaggcttttcttatgaatttaaagttaggtctatgatccctgcctaagaggttaacaatagacagaggtagataactcatatttggaaaaggtagggagcatgtgttcaggattttttctgctctgttgaaattgccaaaggcaagatctccagggaagaatgataagatccagaaatgacttttcaaaatgtacacaaagaagaagttgaatagaagaaaatagtttgtaggaacagagtggattcatctagttgggagatgctttttaatatgtatatgttacaaaatcttacacacacacatttttctttactaccattttctcatggttagaataagttaacccaaggagataaatttaattgttgtatccttacatttaaattatctcatgtatttgtttacagtatttcagattattcccctttacttgacatgctaccttttaatcagcctgaacttctccatcaattactaactttagtaagaggtcattaccaatacaattctttctagcttgaacttaattgaattatatatttgaaatatcaaaaatatagattttaagagattatacagactaatatataaactattatcacatgtgtattgaaacatcatatttaagtagaagtaaacaaggagaaaatgcatttccagtggttgccaggttttatttattgacttttttgacatacagtgtataaccatctcagataaggaaaactgaaacagctcaggaagatgtgtgtgcacctgcatttgatgcaaaagggtatatttgtgtatgtggtggtggaagcagagtcaacaaacacatttttcattcatttgtaccttcctctaattaactaaagagaatttcctatagatggtttttaaggcaactcaccaagaataaaagaaattttgttctttggttagttttacaaaaaagattcttattaatcacagatagtgtatgatcttgggatagaaaggagagagaagagcagagcatgttgctggaagaagtgaggtggaggtctatcttcctggtataaagacaagctagcattcattccaccagagaaatataaaaggaaccctttaaaatagaaagaaataaaatgtttagggacactccagggaagaaacaaatgtgggaatcattgtattactgtactatttgagtatactgtaggttgccttatgtactttctcaaaattaagtatagtaaaagtctaccaggcattatataaaggcattacatacattctccttttttttttttttttttttttgagatggggtctcactctgtcgcccaggctggagtgcagtggcgcgatctcggctcactgcaacctctgcctcctgagttcaagcgattctcctgtctcagtctcctgagtagctgggattacaggcacacgctgccacacctggctaattttttgtattttagtagacacggggtttcactgtgttggccaggctggtctcgaactcctgagctcaggcaatccaactgcctcagcctcccgaagtgctgggattacaggcatgagccaccatgcctggctgaatgtattctctcttaaaggctaagccacgttttcaatttaatgtcctcagtggacaggacttccagttgctgaatcactatttagctttccctccactaaaattaattatatggctataatcatttctttttcataatactctcctatctattcagttgaactgtttgcaaccgccttttttgtaggtcgtaaatggtcaaatgtaagcagtttcatatggttcaacctgatactttaaaatttcatctctctaaactgatcaagttttagaaccagacctacagtatgtttcttatggattgacagtttacaatttgtatatactacaatctgttttaaatattaagcttttaataatagtaaactgtacagctgtccttgaaagaatgtaggcactaccaatgcagtgaagaggaccctgaaaagtggggcttaggctgggagggttcttggcttagcccagaaaagaattcaagggtaagccagtggtgttcaacagcaacttttattgaagcagcagtgtacagcagcagcagaggtactgctccttatggagcagggataccccataggcattgtgccctgagtaccatctcagaggaagttctgcagtcacatttatacccacttttaattagatgcaaattaaggggcacattatgcagaaatttctaggagaagggtggtaacttctacgtcattgggttgttgctatggaaaggggtggtaacttctgggtgttgccatggcaatggcaaactgacatggcacattggtgggtgtgtcttttagaaaggtgcttccactccatgcctgttttaattagtcctcaatttggtctggtgtctgaaccctgcctccagagtcaagtctcactttgtgagtcaagccctacctcctacctcactactcatctttaaagtctctcataaaaacatgtttggtcttcagatgctctttaatcatggtcacatatgacttattctctgtttttatttgatatttttttctccttagctatattactcaacccttattccttttttttttctttcccaccacctccaatttaatcactgaaacatcaaatcaccttgtaaattcagtggacaagtatcagaatttattatccatgtaggtgaaaacatttaatgcctcagtgataggccccacctcttattgtttcctctggcattgacattataatagcaggatctatgtgaggattctttgttgcctaggtttttgggttgaagacatgcacaattgactcccctgtgtcataatgaagcagcagaattacagccagcaccttgatagatatagaaaaaaaaatgaaatgacagtttttaagtttcttgcctctaacacattttacatcctattgtatgttcttaaacttctcaatattaaagaaaaagctctgcagaaaataagaagactttatttcatgccttgcattccttgatattatatcattttttagaactcagccagcagttactacctcttacaattcagaccaagtttgctccataccatttttgtaggctctctgagattttggggattttattaacggtggtcgaaaatcatggtggacattattcacagtgggaaatacttaattgttattatcatccatgcaatcccttcattcctatgatagtataagaattatttgtaggcttttctgctaattggtgtgtacctcagcattcctattctaaaataaactttgtaataaatgacccttgaaaatgcctatattctctgagatttcacttagtgatatttataaatatttagtgctttgtgacccattggtgagtgtgacataatacacagtgatcaggttattgaatagagtggtagcattcttcagctcctaagcaaacaatgatcttgccattgtttaggtctggtgcacgaggattgtttcagttagcttttgctgcataacaaataacctcaaaacataaaggcttaaaacaacaaccacttacttaacaatttgtggctgggcaattaaggctgagacctactgggcaattttgatcttggctgggctctgtcacattgttggatggctggagaatgaggaaattgccatgtttctattatcatcaagatggcaagaggtcctacagccttccaaagtagaaaaggtgaagtcattcctcttgaggctaggctcagaacctggcatagtttttacttccaccacattctgtcagcctatactagtcataagcctagtcctgattcaagagttgaagaaacagattttatctcttggcaggagaaggtgcaaacttactttgcaaggtggcatgcatatacagggtgggagaggagaattatagccatttttgcattctaccctagaggtctttctcttgtttgtagttagattagtgtgattcctcattcacttaacaatctcttattgtctgaaatacagtaagagatttgtatttcctttgtaaatttccttccttcctttgtaaaaacagtcaactattgatacaggagatgttgtgttggatattatttctattgtactttctaatttgtaaagggcagaacaggaagaataaataaaatctgaggccaagataccttcatacgctcaacaaatatttattaaacttccaccatgtgctgggcactcttaggtgctgaggataaagcagtacaccaaaaagacaaaattcttttcatcatagatcttatattccgaatggtttatatcagtccacaaggtaatgaccatagagtatcagcccttttgtaagcatacacctttgttaacagttttcacctttgtgatttgtaccaccagtagctgctgtcttcattagagtttcctaacacattacaaagacatttgttaatgctggcaaaaatgaaacttctctgcttacatttcattttggtctcaatgtgaatacatgtattttttctgtgaccaccatgttgatgtgctaatatgtttttgtaagacggctaagtagggttaaaggtacagcttgtggttgtggaacaatgctgagttaaccggccctttggagaaatgaccccaagaccttggcttcctttacagcctgttctagccaactgagatccctgccaattaggagggttccctagagagagactccgagagcatcagcataaatttaaattctggacccccaaatgtagtttccaaaagaagcttcttgtcctttgctaattgcaaagtaaatatttctccagcaaaaagacactccctcctttcatgctcctgttctccttcccatctccctaatacagtcactccttaaaactgctagtgttgccgaaacctctttgacataggggacaccccacatttgaaggcacaaagaattattctttccatagataattatcttgctttttatatcctccagcagcttcttcatagaagcattacagactaactttgtagatgtcatagtctgcagaaaggagttgatgccttatccttgggcctctcaagaggtgtgagtaagtaggctattattagcatgacaaaatgtatagaaatgaaaattcttcaaaacctcttaatccactttgttctcactctcttctacatgcccttctctttctatttaatttcctactcagttccttacctttcatttaaaacatcccatttctcaggtcccaaattagaaatactttcctaaaatttttctgtttttcagtttctctaaaaaattatttacgacatacttattactttaatagcaaaataatatattagcatgttatctctcaatgatagtcctttttcaccaagctcactgttctgccctctgtattctgcaggacattgtagttgaaaatgacagatctcaaattatcttaggcaagaagaaaattattggcttaaacgcagactgcactaagtcctcaaacaatatcactttatcacaatatcactgcatcgccttctgctctctccctttctcaccatttcagctcacactgccttcattcctcattgtttgtcggccttattctcctctgctgcagagtctttctccatttaggaggaaagctggctctgggcagctccaagtctatatatccacattgctccaaataaaaaaggatagtgctctcgctctctctttcagtatccctgcatccaatctcacgaaaggattccaatggaccctactttgaatcactgtggcagaggaattggggtcctgagattggtctgtgtaagtaaaatgcctgcagttgaagccagggtcaagtgagccattttgattgctggctctgtttagaaaacaagggtactgacaaaaacacaacagatgtaaatcatctcccatctctccccaccaaacaagaaacaaaacttaccaaatctagaaacgtatgtttttctacaagataatcccttttcaatactggttttgaaaataattttaagtgaggaagagtaaccaaagttttttctgtctatttcagactaaacacacgttcaggataatgctaagaatattttaactatttttttctagtttctctgcatttgctagaaactttttttttgggagtaaactggctttaaatgaatagaaaaaataatctactatgcatatgaatggtttctggaattgaattgtgcaggcttaagtaaagacatgtccatgtccatttctagctgctgagggttctgtgtgaaatgcaccagtgtgggcaatgaccttttgcttgattatgcacaaggccactgaaacgttaaaattaactctaacctaattactgaactgcggtgtttatattgtgtatacaccaccaggtcataactctagcctctgtgagccccagctgccataattgagaaatatgccttgcaaatggttgttttgtttacttgttttttctgctggaagagcttgcttttcctatttttgcaaagaaacagatgtagggaagagtttctgaataaagtttaattacattttatatctcaatgcaaaacatgtacatctgtaagtgagatattccttttacttttgcgttacataaaatgtaatatctgaaagcacaatgccacttactattcacttttttgagtaatagcacattttaggtaaggaaatatcaatatactaaattcacatgcagaaaatatgaatagttgctaattccaaaaataaaagatatagaaaatatgtgcatacttaggatcaagagttaatatctaattaattataactcatgaacaaaaattattgtcttcacagaaataagaacctaggttttcataatgtaattagtagaatacaatttagatggctaattatttcttatggaatatgtacatatgatagtaaaatatttctcagaataataagtacaattgtaaacatctgctatgctgcttatctgttttccagccaacagcaaaatcatgaagggattttgttttatttcaaatttggtttgtctcaacagctaagatacagttactaaagtatttcattggcaaacctgtagtggcttcacatttgtctagtttgtcaaggtcttgaaatgtataagacaagggagtttttaaatttaacttctctccatcagtcccttggctttctaccatgttttataccttttatgcccttcctcctaccttgtcaccctttccttccatctcagcagatttcttcaattttgaattaaaattatctgctcatagaataactgtttcttctcatgttcatcatcttcaaaaactaatatttaatatttgcagtgtcagcctagtgaactaagaaagtattgaaatagtttaaaaaccagaaccatctcagttaagctacagatttgttatttgttttattcatttctttgtttggcttacacaaaagctgtatttttaatatcaataatgatgtgcatgctcttgtaaaaacacaaaagcctaaaagatacataaataaaaaattaataatctcactctccctcagtccagtccttcctctgagaaaagcaatgtgaaagtgggttgtatattcttccacattaatcttctgcttatagaaatagacatataaaaaatttccatagagaatgaatatattattttctttataaaaagcatttgacttttctttctgtgtctacagaaaaagaataaattgtgcaccttagtagctcaatagtgtgtgcatgtttacttgtgtcattttaaaatttgcatatcatggacgtctttctaattcatctttttaatagctgcaaaatgttacatgctatgaatatcacataatgtattcaaccattctgctattgatggattgtaaaattgtttcccatttttttgctcttcttactgtaacaaaaatctctatcatgttaatgaattgatacattgactttctatcagaggaaaaggaggtgatgcatcttagaatttagagcacaggctttggaaccatgtggtttcaaatttcagttgtgctttttaactatcgctatgactttaagcaaattctttagcctttacatatcccatttttcctcatctgtacaatggggatgataacactaactacattacaaagttgtagtgaggagttatgagtatgtataaaactttcagacttgtgcctggcacagagtaagcactcaataattgtgagatctaatattaaatgtagtctcaaacatttgatggataaaccaaagatgtgaatattttaaatattaatatattctgccagattatttttcaaaaaggtgtttcagttcacacgtggaatatatcaaaattacgtgtttcctcatatcctgactctaactgcatgttattagtcctttaaactcttgccaatctgattgacaaatggtattctattgttttattgacattttcctattaataaggctaatctcatgtttagagcctatttgaatttccacaggatgcctatttatatgttttatccaattttctaatttttctattaagtaaaacaccacttaataggaattatttgtatattagagattaaccttttgtcatgtgcatagcaaatatttttcttattctagtattaacttgactataatgtgttttgcttttctttttttatattactgatatacttgaattagtttatttttttccctcaacttttattttaagttccggggtacatgtgcaggatgtgcaggtttgttacataggtaaacatgtgccatggtggtttgctgcacagatcgtcccatcacctattaagcccagcatccattaattattcttcctgatgctctcccttcccctggccccaacaggtaccagtgtgtgttgttttccctcgtgtgtccatgcgttctcatcgttcagctcccatttgtgagaacatgcagtgttttgttttctggtcctgtgttagtttgctgaggataacagcttccacatccattcatatccctgtaaaggacatgatccgattcccttttatggctgcataatattccatggtgtatatgtgccacattttcttaatccagtctatcattgatcaccatttgggttgattccatgtctatgctattgtgactagtgctgcagtgaacatatgaatgcatgtagctttataatagaatgattttttttattattatactttaagttctagggtacatgtgcacaacatgcaggtttgttacatatgtatacatgtgccatgttggtgtgctgcacccattaactcgtcatttacattaggtttatctcctaatgctatccctcccccatccccccatcccacaacaggccccggtgtgtgatgttccccttccagtgtccaagtgttctcattgttcaattcccacctatgagtgagaacatgcggtgtttggttttttgtcctcatgatagtttgctgagaatgatggtttccagcttcatccatgtccctacaaaggacatgaactcatccttttttatggctgcatagtattccatggtgtatatgtgccacattttcttaatccagtctgtcattattgggttggttccaagtctttgcaattgtgaatagtgctgcaataaacatacatgtgaatatgtctttatagcagcatgatgtataatcctttgggtatatacccagtaatgggatggctgggtcaaatggtatttctagttctagatccttgaggaatcgccacactgtcttccagaatggttgaactagtttacagtcccaccaacagtgtaaaagtgttcctatttctccacatcctctccagcacctgttgtttcctgacttattaatgatcaccattctaactggtgtgagatggtttctcattgtggttttgatttgcatttctctgatggccagtgatgatgagcattttttcatgtgtctgttggcgcataaatgtcttctttttagaagtgtctgttatatcttttgcccactttttgatggggttgtttgactttttcttgtaaatttatttatgttctttgtacattctggatattagccctttttcaaatgggtagattgcaaaaattttctcccattctgtaggttattcactctgatggtagtttcttttgctgtgcagaagctctttagtttaattagatcccatttgtcaattttggggtttgttgccattgcttttggtgttttagacatgaagtccttgcccatgcctatgtcctgaatggtattgcctaggttttcttctagggtttttatggttttaggtctgacatttaagtctttaatccatcttgaattaatttttgtataaggtgtaagaaagggatccagtttcagctttctacatatggctagccagttttcccagcaccatttattaaatagggaatcctttccccatttcttgtttttgtcaggtttttcaaagatcagatggttatagatgtgtggtattatttctgagggctctgttctgttccattggtctatatctctgttttggtacgaggaccatgctgttttggttactgtagccttgtagtatagtttgaagtcaggtagcatgatgtatattcctttgtgtatttacccagtaatgggattgctgggtcaaatggtatttctgcctttagatctttgaggaatcgccacacttacttccacaatggttgaactaatttaccctcccaccaaccacgtagaagtgtttctttttctccacaacctcaccagcatctgggttttttttttctgtttggttttttgttttattttgctttgtttttgtaattacaacttctccttctcagatgctgattttaataaaaattgttagatactgcaatcttacatgtgtgggtattcattcacaaacattataggtgacagttgtgtgccagacatagtgctaggcacactagggtaaatatatttgcatgtacatatgatcataggtatgtataagctatcttgtcctatatccctcataaactcttctgcctgtgctgatgtaattaagaagacttatgttagaactaattctagatttcttcctcttatgtaggaataacaaaacataaaacatcagaataagtcaaaaagtaccttggagatgcatacttcaccattcttttttgcaataaacaacacgaaagagttaaagtgactttgcagaagtgacattatcacaaagctggtaatgacagaaaagaaatgtgaatcccagtgcattatagtttccactgtatcataaggctttatggacacaatattttgtgaagtattgtttaccatgaactgtgttgacggtgttaattcaatttgtggagctatccacatatttaataatatatcaccatactaactgtgcttacttgcttcttttgttttttttaatcacttcttagggtcttatttttaagcagcaaggggagccacctacttgagccactctcccctgctgcaatggaaaacagtctcccttcaataaaatggctattctagcactttgttctcactgtctgatgtggcttggggccaggtattctgtaaagcagatttgagcattagactaagagagttatcctcagaaaggtgttctgagaaggtctgccaaaaaagttgaggcttaaaaaaaaatgtaagtaggagtaggaagaggagacttttagtgggcatttgactgggtcttgctttcctcctggtaatagattgcttggctatctacagatgcttacaagatgagaaaattggagtagaaaaaaattgttttaaaatggattttagcaacagaaccctctgctctgttgaaattgcatgtagagcccaatttatacaatggataaaaaatagatgtgccttattgttggcaaagatgtgggaaaagttggaactatcatgcactattgatgggaatgtaaaatagtacagccagccactatgaaaacagcatggtggttccacacatacacacacacacacacacaaatatacatatatatataaagttatacatatatatataattaccatataatccagcaatttcatttgagcgtatacccaaatgaattgaaaatagaatctcaaagagatagttttacacccatgttcatagcagcattatttacaatagctaaaagttggggtggcagcaactacagtgttcattgatggatgaatagattaaacaaattgtgatatatacatacaatgagatattattgtctttaagaaggaagaaaattctaactcacgccacagcatagataaaccttaaagactttatactaagtaacttcaaagagttacaaaatggcaaatactatatgattttacttatatgaagtacctaaagtagcaagttaatagaataaaaagtaaaatgatagttgccaggaggtaaggaaggctaaatggtgagtgattatttaatggatacagacttttcaaattttggaagatgaaaagagttctgaagatggatgctggtgatggctatacaacagtgtgaatgtacttaatgccactgaactgtacacttaaaaatggttaaggtagttatgtgttttttaccccaatttaaaataaaataaaaataaactaagtgcctctattgaagtaaggtctagccaaccagtagctctataccaaagtactgtattttaaaactgttgaacaagatgttttctaaaacctcttttatatttttcagttataatcatggtaaaatctgtatttgacattcctgtggactttttgccacagaaaagcacagtatttttttcttaggaaaattgcttgactctcagaaggaaaaatatatcagtgtgctccccaaggcattgtgcagaggttatatcagatgtcttggagtccattatgctgtagctgtaggatgttgtagggtagcaagaaataagtaactttgagaagtggctctcatgatatactaacatgctgggctttgtatttctttctttctaggttttctcctcaagtttgcattcatttatactaacttatagaaacatcccttccacatttgtcattatgactatagtaaaactatggaaaacaaagatgaaactgtaacattcctaaaacatatactgtatacataacctttagcttgttgtaatgtttaacacacgacactgtatcactttaaacaacatctcttcctcttatttgtcccatctaatcctctggcataatgtttttttcatgatttctgtcatttatccttcctctttttgattgctaaatacataatctaaaatgttaggttgcaaactagcttcaaattggctaggagcttgggagaactactctgaaaactttttatataaactctaaggaggtcaaattcagaaaaatctcagctgctggacttggatcccattaaccactgatcatttataattaatattaataaatggcagatgacacatgtatattgcttaactaaaaatgtgtgtgtagtattaaattttttaaaagttagttaagacccagaggacctgaatgtatgtattggaataatgaaaagaacaaaactaccaacatgtgatctagtatcttctaactacaagcacctaaagttccagaggaaacagaagtacttttaattcatcatattacatattgtattgccatgaaactctatacctttacactgaaatgcctgtttcacaagcctatattaatctggacaattggcttattaatcattatagatatacagatataaatatatatatataatatatacacaaacacactcacacatacagacacctgttaatttcctagtctaaaaccaaattgtttaatacatatggtttttataatcagaaattaaaaaaaatatccaaatgctgagttgctttaaatcctaatgttccatagagccccactaaataatataacagctggaagggatttattcatctctggacactaaggagttagggcacagtagttcagttacctggttatataaatctgggaacctatacaatgattaaaatggaaatgagacctccagttactgcaatgaaggtaaatggttttccaggggaattacacttggactcaaaatcaccttacaaaaagccaaaagacagaaacatgtattcgcttgggctatatgtccttattcaaccatatccattaccataaccatattaacatagattctttctgattggactgtgatttaataataatattatttgtttaaatgttggcaattttacataattatctcatttaaaattctttaaatattgcaggcatatatgcattattattatcgactgcattttaaagatgaggaaattgaggctttgagtgtgagtagtagatttcacactcaaagaccaggactcacactcagacctaattctgagtccagtgatatttcaagtatttgaggctgaaaagagtatataactaccttaagaatgtcagttaataagcaagttagtcagtactagaacctaaatcttttgtcaatctgatctttccattctgtctttttcaacacttttgccctgtgttcaagaggatcatttatttctaatcatctgctcttttctaactatacttatcacacatgaggcttagcatcaaccattatttcttattaatgatattatcattgttgaaaaaattgaaaacctctttttaccaccaaatctgcttcatctttctgtttacaaccattttgttattcaaataacaaacttaactataataagcaaattggccagtgatttccccttttgcttcaaatcattctgatgttttaaagccaaatagttttcacaaattgccaacattgtattcaaatgcactaaatggttatgttagtgctatcatgttgtctaaacaaaggcgctgtcagtcagtagagtcagtgaccttcaggctgttaagtggtttgtgcaattttcacaggattatgcttaaatataaatcctaataaagaatctcacttggctttttaaaaggttgttaaaattaatacttaatccaattcctataaaataatattgaagacataaagtaaaatttactaaaaaaaatgtatttcaaaggtttggattttctactcaatttatgaagcatatatggtctcctaaatgctgtgtgaatcattggacatgccagacatgaagcaaacttcccaccccaggaggcttctcagcctgaagcaagctgtaagtgggtagagttccaagagggaacacaacgtgcatgtgcgaggaaagcagatgcagcatgactttgggtttgttctttgggaacacacaactatatggaaaaatacatgctgctcccaattgctgtagacatctgctgaaggcacgtgagattgagactagggaatggtacagaatttctcctagaatattgtagtttaactttggaagcaaggggaattggctgttaaccgaataagagtttcattctaacatgaaaattgtacagcgtgctcattcgtgtgggcgcacagagggcgttaagctatttctttataaaaatatgggaacattgatttcctttagcagtattatttgatatctatttacagtttagttgggttgtcaaacatcagtgcatttctaataacatgtgtgtttgtgataccttgctcgtggcaaaggcttaaaaatttaaaaaggctttgaaatactttttaggcatgaaattgagctcacaaaataagcttaatggcaaattagtcaggaacacatggatatgtttcctttaatttgtatacagattttcagaattaagatgtggtaaaacctactagcagtctattaagccttctaaggcacttgcaacataattagagatttgcaaattcaaggttggcctaatagaaaaacgaacaaatttgtgtttgcattttagcattgcctgagtatttttacaaacacttcatttagcataattttgaaatggtggatatgttctgatcagaggactaagcagtatgaagaaagcaaaagaaacatgtttttaaaatcagggtaatagatacattaagaaactgcttctgtgctagcttttattttgttaccattgtcctatgggaagatgaggactataatttttcaagttgacctccctgccaccatattctctagagccactagaatggaactagtcttactctgttttcctcaaagatttaagtgtatgtgtgctacacaattatttaacacttcaataataaaataattgaaagtaattgtatggagtcatagaactgaacatagtcaccaacacatttttttaaagtattttatggtctatttgtgtttcttttcagtgatataagagattttcatttgaagtacccatgaaagttttcttagggcagttcaaagggaagtctgacagaaagagtgtttaggttgatgaagaagctttctacccttgggcagctttatcttaaactttaaactaaccatggaatcatatgagtgaggaactcttagacttctttcatttatatccctgactttaagcatagatgcatgaaaatttatttgattttaagacttcttagtgaatggattttcaaccttacttcaatgcaaaaacgtgattttccccagcttatcaaaagctttcaatgctcattctctttacattcaataattcatttgtctcctaatgtatacattttcccaaattaaaaatattcatttatattttttcctgtatttgcccttttgtctgtcttaagttggcccatttgttttattttggttatttgtctaacttagaaaatagaattcctttattgaatataaagtcccaaagcatgttacttagtttgtgtttcaatattcagcatcttgcggaatattgaaaaccagtaagtaagagctttgctagtttcaattacagaacatgtttgaaaaacatgcagttgtgttaccttcttcagtggtggcatatggttaatctaccaccaccaagtggaaattgggtaggtgactacttcagttatcaaataatactgcctggtaacatcaattttgttcgtatatgagcataaagtactggaaaactttatacttttggatcatttaaatgcatctaaaaatcatagtttgtttcaatattaatttgcttaagaaatcctttttctccctgtcaacattgcagaggccaattttagcacagttgtgacagttccttctaactcataaattacaaattgatggccttaaactgattttgttgttactcagcctcatttctgcatcttaagactggtctcatcctgaaaactagtaagaagagatctaatatcaaacctggatattcttaaagactggattatttaagactcgttcaccaaattttctaataccagtaaatggggacacattatattgaataagggtattgttagccaaattctaagattcatcttaaattgttttcttataagaattgtgtatttaccattttaaaaatcactattattttaaaacacttagaaagtgaacatttgaaaatgatgtgcctttggatgctctgtaatgttaagcagatccagacataaagacaaaagtaaattccagagtatttttgtagccatggaatcaccataaaaaggggtttttgaccccaatgttaccgtaacattgtcttcagcatttcatatttaattacagtagattactcaccaatataataaatatagatttatgagatactttaatgttctaaaacaaatgaaaaccacccaagaggagcctcaccaaacctgaggttgtccagattgcattgactaagattaagtaaaagatcattcatctccagaggtcatgcaattaatctcagagtgggagttaaagcaatgactaagcagaaaaggaagccaaatacaagctcgtaacaaaaggtgctggggctccaacatcaaggaacttgttatttcctttttatttatttatttttttttaatagacctaaaacactcattccttactactggtttctttgggtcctaaaattccacttggttaggtcagctattttccatgactatttttgatacggtcaaacaaatacaaagaataagcttttaaaaaactacagtgggttttcatgtctaggaaaacaatatgacacttcattttatgtgtcaacagaaagtaatttaggatgaatgtataataatccagggtttgaacaatgaaaaagctcaagatacactttaaggaagacatattctactccagggttttataattatttaaattcaaataaaatcaaagttcatcttcacttaacttaggtacctgatacctgttgcaaaatattgaggaaaatgtttggctgtcattccttgaagctgaatctttatacccttgcttgataatccctcaattccctgtggcagcaaatttttatttctagtaaacacaacttgttttttccttcaccttattgagattcaaaaccttgtgttttaaaccaagaataattttgaacttggtcgttccttattgcaaggacttcctccaactagggtgaattttcacccacgattagcctgcctttggagtttatgatgtgaagtgccacagctgatggcccatgaaagagactgctaagtctattgctcacatcaatattcccgctggatattttgctcattccttgggaatttcaaagaataacaaataaccaacaaatcatcaaaaactgtaacatgttacccaattcttgggaataagccagtgagactaaaatctgcttaagtatcacaaatgtgaattcccagcatttcaagcttgtaaactgtatccaacactcaccaatgtctattccatttcttagctgtacagaaggggcacattcatctggtaactgtcaacaatgaggttccttccttcttgaacccagctggccatacaagcaggcaggagttgcatgtttgaccctgagacagcaaagggtattgccctgttgggaagacaacaggattgcgatgtaatctggaatcaatttgagattagcaccagatgctccatgccagtaataagtgctgatcataagacttaattttgtatgctattagaattaatgataaggtataagcatagtatgtcccaaactataggaatgaataagagcagagtgaaaaactgaaatggtaaaacaagaatagaagttttaaaataggtaaattgaaaatatttgtttactttattttcatagcttgagtaaaagagttggaagacaaaggagaaaaggacttgcaagaagccaatttttttttttatgaatgtgtttgtttttcctcaaaagtcagtcgtaaatgctcttcagggaagggagtcagagagagccaaatagtggtcttaaagttttgtttgtgttattatagttctcttggttttttttttacaaaaagagaatggtgaaataacttttgtcacgttagtattagtctcataatcagtggaacacagtccttttttgagtcattcctgaaatagaaatgagcatgaaatgagcctggtattcattgaatattaataggtacatttagatgcatgtctaggactgtgcagtatatgagagatcctttactagtcatcttgaatttaaatattgaaatggtaactaattatatttcactgtatacacttttaaatagtagattatatattatagttggtaaggggaaacatattgtattatttggctggacaacagctaatagtatcacagacaactccttgagattctctaagttctacacataagcttcttaattaccaaactcataacagaatatgtgtcttgaagcagctttgagtcctattttttatataattataaaaatagaagtcaggttaaaaaatgattaatattggtgcaaaaatggttttaggtatcccttcaaagattctcctaaaatgatttgtaatctggcaaataaaaatattctccatgctataaatatgctcagtaataagtcagaaatagaatatcaatttctgtgaattttcaaagaaaaacatgctgggttaagggccaacatcatataacatttattgctttgtattacattatacacacacaaacacacacatgttttgtgaacttttataaatggaatcaataaaaatatgtgtatataaaatatattgttctagatatgaactatatttttatattatacttcaaaaatatgaaaatattgctgagaaaggaccatctgtgtcttctcacatctaacttttcttgattatttctaggaaagcagactaaacacacagttctgacataatacagcatcccattttgatttctggttagctcagaaggctttaccagccaaagaaagtctctgaaaagggcaaacctttctgacctcaggaggttctgataggaagaactgaagcggtgaacacccagaggagagaaaacatgggaataaattccccaaagttctgtaaccacagtgatgtgggtgcatagaggaagacataatttcattcttaaagaatgtccctgttttcacattctttcatttgtcttaaagttgatcttgcagatgatatagtccagatgaatttctgcttaataagaattcttgttcacaaattgacagaaaaatataccaaccatatatgtaaaaacacagtggagaatacccaagcataccataatacctttctcataattcagctaataatctatcagatcatttttaggaaaaggaaatttttgcttcttacaataattagattgagagtagagaattagattgagagtagaggtataaactcgtaataaaaattagaatgtggtttctttctgatgctccgcttcctttgatttattagtttgcatcttatcaataaattcaccttatccaaatttgctggaacaaagttttcaaaaaggaaattaaggctcttatgtgctaatattctgtgtagacaaattagatgctgctcataaccaaaacgatctcatttagtttactctagaacatttgaatagtgggatgagggtctttaaaactgttttggacatgtgaactgaaatataagaaaaccattacaaagttgggtttgtattagttttttgttgctgtcatcataaattaccaaaaacttagtgtcctaaatgacacaaatttattatcttacaattctgtaggtgagaaggttgacacaagttttaccatgctaaaatcaaggcatcagtaaggctgtgttcctttttggcaactctagggtagaatccacttacttgtcttttccagattttacaggctgctcacaatccttggttcatggcccctttctccagcctcaaagcctcaagtggcaggttgagtccttttcacacagcatctctctgacacactcttctgcctcttcttccactttccacttttaaggactcatgtaattaaatggaccaatctggataattccagataatctctgcatctcatggtcagctgattagctagatgctagaagtgaaaataacaaagatatgcaaatatgtatgagactcctttggaagttcataatttcatgggagaattggttgtaaacaaataaatgcaaaattgacagatgtgtcctctggaaatagaggagataaattattattggctcttaaaggccaagtagaattttccagctaaagagaaggagaggaactttccattgagaagcaacatcaataaaatcacaaaagcaagaaagagcatgatgtgatcaaattatagttaactatgtagtgtgactgagcaaaggcaaattagggaaggaggtgctgttcaataacataaccaagagtcagattcagaagggccttctaaaccatgccaagaactttgggagtacaggcactgggcagatttaaaaacaaacaaaaaaccaacaggaataaaagaccagccctctgcactataagaaggtaacctgacagcaaagtggaaaatatctggaagaaaacaaaaaaaaaaaaaaaaaaaaaaaaaaaaccaccagatctttgcaaaaatcattctagaggttctagagatgacagaggtttgaactgaatgaggataaagaaggaatgacacatttgagagatatgcaagaagtaaggcagatggccttgagtgggttaacaactttcatcaaacatcttaaaggaattaagtgctcctcagattttacccaaaccagattaaggctgttctattattaagggtgagttgattcactcagctgttttatagtttcatagagaccatttattatcgttactaattatttttattttagggattataattttagaattcttttcattttcaactacttatatatcatttgtttctcatacctaccccaaataatgagaatagtaggaattattgattctattttataaatgaggcaaacaaagcacagaaagtgctttacttaaggtcatattgctgatgagtaatatagccaagtttaaaatgcacgtttcctgatacctatttcagatatttaaaatttaatgtcccactttttttaagcacacattttaaaagatgaggtcttgagagtttaagtaatatcccccaaagatagactatgactaaatagcttgacagaaaatcaaactcagatctttctaacttcaaagcccaaggtcatagcagctatacattactgcatccctcctcacctgctggagaagatcagggaagaattaatagagaagtagcctttaaaatgtatcttgaatgatgtatgtaggtaaggggtgatcttcaagatacttaaaaactatacagtaaaatatacaaatacagtaccccatatataaatatgttaaatatattatcatacatagataatacagctgcttaccaggtgttgttagcagtagtgcaaatcatttgtgaggttattcagtgatgcctgaaaagagttgctaatttttagaaatcacccggtattgttttcagtttgttagggttgattcacacacccacacccagacccattcatactcagggaaggcttcctcagagacattttgtgcttaactccttaaatcctctgcagtttaaaagttccagcagaccttgcaggatccaaaagtgtgcttgattaagggtgggcaagatgtaatggacaaaaaagggattcaccttcctctccccaaattctgacataagagataaacaagtaagccaaccttacttctgctttccttcagtattttcactccccaatatttgaagtcacttcttgactactactctttctcctaaatattctctggagataagggaatggcttatatacagtcattgatcacgtatccccgtttctacctgtctcagtacatttttgtattgctataacagaatacctaaggctgggtaattcattcaaaaaaagaggtttatttggctaacagttctgcaggctgtacaagaagcatggcaccagtatctgactctggtgagggcctcaggctgcttccactcatgacagaaggaaaaggggaactggcacgtgcagatcatatgactagagaagaaaagagagagtgtgtgagagaatggagagagagagaaggtgccaggctctttttaacaagcagctctctgggaaactctcctaggaactaatatagagtgagaactcactcattaccatgagaatggcaccaagtcattcatgagggacccactccaatgactcccaaacacctcccatttggccccaccccaaacatttgcgctcaaatttcaacatgacatttgcagggtcaaatatctaaactatagcattaccttaactaggtcttaaggtatatatgaagtttactttgctcagaaaataaaaaccaaacatatgggctatttcaagctctttacccctttaaaacttttttctatctatttcatctggccttcttttttccagggtcactttatttcgttcttaaatacttcaattaaatgagaaatatttattttagagattaagacagtgttcttagagattgagtaagacagtgttcattctttcaggaattgtcacatttcctttaattttcagctcatttgcttaagcctttcctgagactttctcttcccattaattgcattgcacataacatctgctgtccttgctacaccctcttaaatggaaagtttcatcatactacccagtggtccattttggtggcattccactgaaagaaaaattcaatggattacaacaaaagccacagttattcgaaactcaaggggaagtcaggcttctgagactgtgtagtgccacttcaaaagaggatacaaaagccccaagatcaggcaagatgggctagaatcatatttcatgactttaaaggaagactacattctcaactccaccaaataaagcatcatttatgcttgctatagaagataattaaggaagacaaggttattttgtcatctttcaacttttgacaaccatcccaagtgctttcctctcttcctctatttctcttgttatttgttcctcttcctgaccacctctttttctccaaacaatcgcaaaaactttttggtagaccactgttttccagctttgggctgagagatggactctgatccacactcccaacctcagggaaactctgaagtcttcaaatcactaaaactgtcctagaactcaaatgccttctggaaacaagagaatggaattctttctaacttctctgttccaacctggacttcctaatgccatttcttgaaacagctttagggatactctagttattcatcattgacttggtcccaaaggaccaagcatgacaagtcaaaatgatattcctgaaaacatgatatagctctctggagttcactgtaatctcttgaagctgatattggaacagaagtagctaactggctgagtactctataataagtgggacttattaagacaggttgtttgggacactgggtaatcacagcatgcccgcatatgagagagtaacaccaaagcatctctgtctatgcctgtccttctccaactctaactcgaattaagtcacagccatgaaatcaagaaaagggaacaatatttatctttttcatttaattcattcaacgaatatttatagactcactacagttctcaggctcttgccaaagagaaaggagctaccacagcctttagagcaatagtagcagtgcttactaatataccaggaatatcggccttacatgtctccccttgtgcacaaaattatgcaagtaaatcagggaatcactgctagaatctcccaatactatccaccccacctgtattagtgcattctcacactattaataaagacataaccgagactgggtaatttataaaggaaacaggtttaattgactcacagttcagcatggcctcaagaaacttacaatcatgatggaaagggaagcaaatgcatccttcatatggcggaaggaagagaagtgccaagaaaaagggggaaaagccccttataaaaccatcaaatctcatgagaactcactcactattacgagaacagcatgagggtaaccacccctggaattcaattacctcccactgggtccatcccaccacacatggggattataggaactataattcaaggtaagatttgggtagggaagcaggcaaaccatataaccaccctactccaaaataatcagtcctgtgaattgcatttccttttcaatactttgataggtaaataaaaattaaggttgaatttctataaagagtaagttctttatatttgtagttgttactacattaattgttcttcctaatattatgaaaactggaaacaaaattcaatatcaccttgacaaattgcaaaaaggcctagaaatatgaattaaaattagtagatgatatactgggttgcacatagggacccaatcaaacaatagaaggaaacacactagttagtagcaaaggaagaggagtgaaatctactaatgataacgttaatgttgggagggaaagtctatgcataggaggttgactatccaaagaatgaaagtaattatttgatttcttctgcattaatcagatgcttattagaaagccatattctattttcctcaggacattctgaaagtttgtgaagagaaaaagtagatagggtacaagtcttaatatgctacatggaaaatatggttgataagaaaaagttaaaagtcatataagttacagaaatcactaaatttaaagattcaaatttctaaagagctcttgtgaaaggatgacactctcttcagaatcattaaaaattacactggaaaaccggctgtcttggaattgatacttaaaattcaccccaaaaatagaacttttccatcagtggtggaaagggacctataaataaatatgtgcatatacatttatatataaaaaatatatacacacacaaacatacatacacatttgttccccaggtctatacttccaaacctaccctcatcaataatgatagagaaagcacagtgaaaagctgtaaaataggtacagtaaaatcttactaatcttgctaaattacagggtggatatttctagattagttaacacttaacctccaaacaaattttaaagatgattaaatcagttgtattcccctccaagtcctatatgtaaccattattgatgaagtaattacaaggacctatcttgatgattgtggaaatggatgttgaaagtatttctgattaagaacagacaattgcttcaacaaatagaatgggagaaaaagtacctagaacaatctgcattacctgctataggtgaaatactccccttatcatatattatgggtaaagtttatcacaaattttaatgtagtagaggttgagtggggttttctatgtttttcaaactagttaagaaaccagtagtttgaagcaaaatctgcaacaaaagaagaatgagtaagatcctgaagcatagtgaaaccatttaagaacgtatttgaagatgcatgaaaatcatctttacatatgtagctaataaagagctgaaaacattaaaccatcactataaacatttatattatctgtagctaaaattgcatggagtgagacacatgatacgtggagcagcacaaataagaaactgggtagtcatttttccccacatgatgcaattccagattaaaggtacatttttcccccatagaccaataaaaagcttcagagaaagacatagtgggctgtgttagaatgagaattagacagcacagtcaactagtgcataacatgatgaaagagtagaatactatcaagatttcttgtataatcaatcacagcaaacatgtcagcaagtatgaggccatccgctcctgtccatacaacccagtagacaatttgggtaagggaatgagtatagcagtgccaaatgtggctatcaacacttcttctgtttctgtctcaaaagaacaaaattctaagacaagctcttagaacaaatggaaatttatccaaataaaaatcaaatgataaatgcccagagaatattctttctttggaattcgttcaattctttaatttaaccagctggaataaattttcaagtagcattctgctcagccttttgaaatgaaggacttttctgttaattggaaagttatattccatcaaagatgaagacagtgatcttgccttagtgattcttagaaaaaataaaaggcatttggtgaatatttatcatatactgattccagaacatgtattttaagcacaaatgaatgagctgtgggcctacacatttaactaaagaaaaatagggaaaattcaaatacaagttttattttaaactctacataaaagctaactttcactatgctcagtcatgagaggaatatgtaaagagaaaatagaaatagaaaccattaattttgagaatgaaagatggataatacagctgtggttcctgattttctgaagcaaatgaattagataagtcaacacatttaagtgttctttactgtgttactggaatatgtgttattggggctggggaaacatgagagtcaactcaaaaagatctacagcaagaaaataaaaatttactgggaaaaaattattttgaaaattcatatttttaaagcaatctgtaccataggcagtactttaaacttagtcattgattatagatatattaaataacattgttacatttaaattttaaattggcacgttaggcaaactaatttatcgcaaataatgtgaaaagttgtttaaaaattaatgatagtcaagtactaaagaaataatttttccagatgtcttaaaggaatcactggatagatggtctgaattataattgtgtattctgatttaaaataattttataggaagacttctaggtaatactatttatgtactttcagtctggcaatgtgtgtataacagaaatttttcaaagaggctgttccacttttttaaatatttaaattgctgagagaactttttaaagggtaatatgaaataaatatttaataagttccatagactcacgcatattctccagcttgagatggaagatggtggttgaagcagcagggggcgccagcgggcatggtggtgagatggggacagggtagagtacgagtgttacaaaaaaaagatgaacacatcaattcgtttttgagatagtcactaatattttgagaggactaggtccaaattgaaaatttgggatagaacacgacaatgttgttaggcaggctttaatggtctttgaaatattagtgttaggacgccccactgactaaatttctgaagataggtaataaaattcccatattataagctcataaacattatataaaacaaccaaagtatcctattcagggtcatttttttaagggaacaataatattcatccaacaagctagtcatgaatttcacggcaaaagtaatgaataatatttgacggtgcttaatagatgaaatttgccaacataccctttgataacaagtaagaatgagaataaatttatatgcttatttaatagatacaattatttaaaacccaagatctaattcaaaatgtgttatgcaaacatgcttagatcaagaaattgtctacatgtaagtcaatgtatctgatttactttccaagagttttatgatctatcctaaggtgatagataggatttcaaagtcaagataacaacttctgctctgaagaaaaaattacttattgtaaatgaacttttaaccaaaaagcagttgatacaagagaaataaacccatacaaaagaatgcaaaatctaaaatatttaatataaattataataccctgctagcttttaaaatattatacaataaaatacagaatatcctttacttttataatgagtaaaattcgtaaacattgccaatatttttaaaaatctttgggtactttctcccctgatcacttttaactgttcttttaacatagaacaggaaggcatcctagtatgcaatacccagtgcctttaatagtttcttttggactccagctaatggcccttttaaatggaagcaaggattccaggctggggttccaggcagcagaagcaatgaggtggaatggagttagcttgaatgaaagggttatggaaacctctgtcacgacattgagccaacattcaaaatttcagattctgagtctttagtggataataaaattatttaaacaacagagaaaaaaatttgtaaaggcctattggcaatggtccatttgtaaggaaggtatttaattaggcaaaagagagtttattatgcttaaagcagactatgaaaatacacattctaaaaagttgtgattactgatatttatgatgtctgctataaggtgaaatgatttataataggactgcattcaaacctcaagtagcattttaaaattttaaagctatataatttttctttctcttttttagtattaagtataacaaaatatgaaaatatgtgataatttcattaaagcttcaaaaatgtaacagtagtagtctaatggaaaattatttctaaattagatataaatgatgtataattttcaagttacatatatatatatatatatcatacctctatatgttgggggagtggaaatactaaaatataggcttgtagcaaaaataaaaagaaagagaatagagaatgagatagtgctgaatggtgctgactcaaaaagtttattccaaatgctattaagttctgagttaatttctgataagcagcttttccttgcccagcaaattcaaatttcaagagattaagaaagtacactccaaatcttgatttttataaaactcctctcttttaaacagttagtccacagctgggctctttccttgcctcagtagctgaagtgacataaacaaggatggcatgtcacattgtgctctattgagaaataatgtggaggcagaagggtgctgtggttaggaaccctccttatcctcatctgtagaacaggggttgaatagagcttctaggcaccgtactcttacttagaagttggcctggtacatattaaaagtaatggcacaaaccacaattattttgcaccaacctaataaaagtgtgtgttgaattgtagttataattattcttactatttttaaaaacaaactatccaggtcatcttcaccttgatctgcagcagggtcctaattgggagctgagaacacagagaggagaaatgtaaatagtccagcctaggaagaggttaggagagtgaggaaggtttccctgaaggccagataattcaacagtaagtctgagttagggcaagggatctagaaactgcattctagataaatgtatccaatatatgggatcagtaaacattatggtgggacaagtgcaggggtgactaaaaagacaagtgtgaggccagcaaagtagataagtaagcaggggtcatatcacagtggacaaggaccctgagggccatgttaagaagcttgggtttatctgctttcatttcctaaagtttatactcagtgccttccaatcattatgttcttgtttctaaattcccaaaacagcatgatacaaatagagtgcctctcttaaactggtcctttgaaattgatgataaaatgttatttcaatctcagtatattttaatggtcagagctatctttgtaaaagtgggctcaaagtaatatcccaaattaatagcatttagtagagtatgtaatgatgtatcaaattatttttctttgaataattaatcagaagcatcttgaaaattaaatagaaaaggcaatagaattcgtgtgtaacctaccgcataggtaaatcaggtagctttaaatttcagtgtggagaaattgtgtgcttatttatcaaaaagcaaaagacattcattctttgatatttttactatatttgttgtaaattcctaggttaaatttagagcaagaagaagttttctattttattaaaacaaacaaaagacatttctcaatttacttgataataatataggcctgtaaatatgtatctacacaatacattataattgcccccacaaaagaaaaaagtcatactatagcaattcctcttccttgcaaattttcccagtgatattttaatttaaaataacaggccgggcacagtggctcacacctgtaatcccagcactttgggaggccaaggcaagcaaatcacctgatatcaggagttcaagaccagcctgaccgacatggtaaaaccaaaccccatctctactaaaaatacaaaattagccaggcacggtggcacgcacctgtacttccagctactcgggaggctgaggcaggagaatcacttgaacctgggaggcagaggttgcagtgagccaggactgcgccattgcagtacagcatgggcaaaaagagcaaaactccgtctcaaaaacaaaaaacaaaaaagaaaaaagaacaaaagctggaattttcattctctatacataataatcaggtccaattccagattcaaaaataataagatcaacccctttttcacactgtgagtgctttatagaaggcataaagccatgggcttccagttgaatttcattccacaccaaataaaaagaaaagaaaaatgtaatacttatttaattggtttgagtcatataattcgtgatatttagtcctcagtctgtaatgtggaatacatttttagcatttgggtaaaaattataacctagtttgtcttgggaagtgaactacttacagctcaatggctccccttagtgacacttcgcaagaaattcacaaagcagcagcttttatgaagacctatagacagattttatccaaacatcaagaaaatagctgctattcataatttaagtggttctcaataagtgaattacagttgtgattctagggaaagcaactctttttttcataacctcattatgtttaaaggatattgaacgtgttctatggtttgcattttcacttggaatttaaatatatacaagttaggaagaataattcaggatcactctctttgtcattttttacatgtttattttttctagttcatatatgcacttgaacaggttttaaaaagataacctgcaattaatttaatttatatctgggtgcctattccaaatttatctattaagaaaacttgccttaaaattagtagctacagtaagtcaaaaacgtatttgatattcattaggaaaaatgaaagaaacaaaggagcaaccatgcaatttgaagtaagttttgagagtatatatttgaagaaattgggtcttctgttgctctgcagctttggcttttaaatgtggttgcacatcaaaataaactgggggggaggggtgtgaacttgttgttgactacaggttcttgggcccctcataagaaccactgaatcataatctccaagggtgggatctaggaatctgtatttttatatgttttggaacattgtctgcagaaggccataggaaatgtttatgtaaaagactgtatgtgtttatactaacagaaaataatttcagaatcttaaaaataacaattatcaattcaattatgtgatactactatgcaacaaaatcttaaatatggctttttggtctacatggagattttagctactctttcaaaaattaaggctcaaaaataccaaccactgactacattccctctacagcatcttattacttacagcaattttctgaaataggaaataaggtcaacatgtaagaatagcctattggccttttctaaactcatcacagaaacatccaaactctggcctgctatctgaattcaatacttgcccttctctagttttcagtacactggtcctcaggacaaactcccaacatggcaattgaagcccgtatatctttccagcttctatgggtaatattctatatatagactctgatcaaaccaaggaagttgactttcaatgccccagattcaccatgtccttgcatgccttagtgcatgttcactgcctggcatgcacttcttccctcatcagcctagcaaactctcagtcattcttttaggctcacctcaaacatcattacatcaggggaattattttcagtctctgaaatcattttcagtctctcttcatggagttcaatgctttcccactgtacccccaacaggaccttgtacacacctctattttagcattaacatgtgactataattattggcagtctccatatctaacttatatccccaggttttatcacacatttttggcacagagtaggggctttgttcatgtttgtgcaaggggttaataatattagttttcatttgtcccatgagtaacatatgccagtcaccatgctaaatgctctaccagcatctcatttaatccttatgaagtttagcaagaagtaaggattattcacattttaaatatatcagagagttaatcctgagaaatatcaacaacttgccagagttcacacaactagttggtggcagacctagaatttgaaaacagcatttttctggccctaaggacagtgtacttaaatgttacaccatagtgcttctctgcaagggctcagattgtacttgactgctaatagcaaattctctttgatgttttctacccaaacaccctcataggtagaacatcaaggggagatgaacgctgttttaatcactagaatgttccaaaacccagttcaggcaggtacgtgcgtgtacacatgcacacaaacatgaatattcagtgaatggcaaagcacacgtgtgtgtgtatatatatatgtgtgtgtatatatgtcagattgtcataactggaatgcttagtttgcaaaattgccaaaaaagcctgaaaaaaatattaaccacatcaatgaaaagtcaccagaataaaaaaggaagtcccctttaatgaaaaccttacaaaattatcccaaattacacgtgatttttaatggactacagccactcttgtgtatttctattttatttcttacacaagcagaaaatatatttatgcaaagggtagttagcatttccaaccactaacacatggcctgtaaaaaaataacaacctcattcttctgttgtgcaatagccctctgttgagcagcaataatgtacaatgtgttagtttcctgttactttactagagccttccctttcactcactgcccagactagttattccttggacataaagttataataccgagtttcaatctacttccaaaaatgtttaggcctgtcttaagaaataatcatatcagtttgctaataagcagaaatgcactgccagttgaggatgttgtcacaagtggctaaaaaacatataaatcaatctgtgaccaaggaagaaacaatacatttcttatgtgtccaaaacattatggttgggatcacagctgtaagatgttggaccgtcatcaagagaacaatgtcaaacactgaacttctggatgatttccataaaaataacattttgcttggggtcagtagtttttatggaactttggaatggtttttgctgacaattttttcgagttgaactcaaacacctccaaaatgctcctcaatatggaaatattatgtaatccaacctttgcagccatctccttgtgaaaactaagcacatagcatgaaaactagtatttttctctgtttgtacagttttataaaatttaaattatgctacatattcagaaagggaaacttactcttcagttttccctgtttggttattatattcaagtcagcacatcaaatgtgtactcattaaatccagcatggaaagaaggccctgatcccttctgtagaaatcttatcaacccagcaaaattcttttaagtgaaaagaataatggaatcgagtaatcagaatataagtagttcagtttaggcataatagttgcctctaatgttgtttgttcctctctgtatgtccaaaacaatttgcttcacccttgaatgaattctgatttttgtcaattgtccctttagattccagaatttgaaggtatgttgtgctgagcccaacaaggaaagctttcaaaaagtaactggaaggttttataaatacagtctcatgacaaagctagatgtggcataaaatcattaatccaaggagaccgtattggcgtagtatacctatgcaatattaataataccactccctaggattctgtaaccagagcccaagaaaaggaaagccaaaccactgaattcaatatttgcagcctacttcaggacatgaaaatattttggttctctcatgcagacaatttctccaaaatatttttgtcaaaagttacttattttagacagtctaatttcaaattttaaatgacccagtatgtgggatacacattcagaatttgtcatacctcaggaaacagttggttcctagtttttgtttactgtaatattgatttgaatctaggtaatttctcattgggatatatgtgttcatggatgttactaaaaccatgccttcagactacactgtagactacatatataaaaggtgtacatgataataaaacatctagttaattcactgtttagaaataaataaaaataatcatccaatttggtgccaggtttatctacttcgatcaaattattctcttcttctaaaactcccagcatttctccaatgccgacagaataaaattcagttcttcaagtggctccctgttggctacaataataccttttcacatccaaacctttaaagtcatgttgattccacttttaaaaatgtctcctctcataatgtgagtctgagttaaatctatgcttcaaacccagctccaggtcgggggcctgcatgaaatccagtatacatgtgataaatatctactcatttgctggatagagactcaacctgccctggtagcttgtaccagagggttattgatcagttatagtcatcaccaccctgcatgtagagaaattataatcaaaattaatttcaacatacaaatatttatgttaaaatacaattatcttgttattcatccttattatttctgcatttgttatgcaaatcagttcttttctcttagatagcaggcaaatatcttgacaaattataactatgtaactgctacttcgaaaaaaattgaatacaacatggtaccttaaaaatatgagccagataaaaatctctcctttttttttggagatagaatctccctctcttgctcaggctggagagtacagtggcgctatcagggctcactgcagccttgacttcccaggctcaagtgatcctcctacctcagccttctgcatagctgggacacaggcatgcatcaccatgcctcattgattttttttattttttatagcgataaggtctcactatgttgcccaagctgatcttgaactcttgggctcaagcagtcctcccacctcagtctcccacagagctgggattacaggcgtaagccaccaggcccagccaaaatatacattttaataaatgttttcaacagcaagaaatctatctaaaactttccatgaaacatgcataaataactatcatgtaaaataagttccaaacttagaagaacagaactatttggatttcaaacagtcatatgttagttgccttattatatcatatacgtgtttcacatttacattgtttggaatataccacagacttaataatagttgaatgattgaaatagtagatatttagtatctatcattatgatatataatctaagagaaatttaagtcattttttaaaatgtaattaaaaaatagaacataattgaatgtaatttttaaaagagtatcctttcatttcaggaaaaaaaggaagggagaggaaaagaaaaaaacctaataaaggagaaagtaaagaagcaatacctgacagcaaaagtctggaatccagcaaagaaatcccagagcaacgagaaaacaaacagcagcagaagaagcgaaaagtccaagataaacagaaatcggtatcagtcagcactgtacactagagggttccatgagattattgtagactcatgatgctgctatctcaaccagatgcccaggacaggtgctctagccattaggaccacaaatggacatgtcagttattgctctgtctaaacaacattcccagtagttgctatattcttcatacaagcatagttaacaacaaagagccaaaagatcaaagaagggatactttcagatggttgtcttgtgtgcttctctgcatttttaaaagacaagacattcttgtacatattatcaataggctataagatgtaacaacgaaatgatgacatctggagaagaaacatcttttccttataaaaatgtgttttcaagctgttgttttaagaagcaaaagatagttctgcaaattcaaagatacagtatcccttcaaaacaaataggagttcagggaagagaaacatccttcaaaggacagtgttgttttgaccgggagatctagagagtgctcagaattagggcctggcatttggaatcacaggatttatcatcacagaaacaactgttttaagattagttccatcactctcatcctgtatttttataagaaacacaagagtgcataccagaattgaatataccatatgggattggagaaagacaaatgtggaagaaatcatagagctggagactacttttgtgctttacaaaactgtgaaggattgtggtcacctggaacaggtctccaatctatgttagcactatgtggctcagcctctgttaccccttggattatatatcaacctgtaaacatgtgcctgtaacttacttccaaaaacaaaatcatacttattagaagaaaattctgattttatagaaaaaaaatagagcaaggagaatataacatgtttgcaaagtcatgtgttttctttctcaatgagggaaaaacaattttattacctgcttaatggtccacctggaactaaaagggatactattttctaacaaggtatatctagtaggggagaaagccaccacaataaatatatttgttaatagtttttcaagttttgttcactctgttttattgtttgttttattgagaaattcttactcttagagactcatgaattaagaaagagaattctgctaactcagagaacctggttcctatgtaattcagaatatattacatttctcagtaatatttgttttttgaatccacctttatctgagccaatggagatttacttatagcgtattaggagatatttattccattttcttattttaatcaacattctaattatagacacatgggcctccctagctgatttcactgctcccccttcattgcttagaaatgggcatcatttcttgtatgtcagatccccctgcatcttcaacatttagtcttttcttctccatattttctatctgtggatctctttaggggattgaagtcaccctagctgaaggcctcaccagtgtttcacagaggacacagcccaccccttgcaggaggaggtatctctgagtgtgcagcacagaatcgcatgacccaccttaaccttcctgttgtcatggaaggatgcacggctgctctgtccactgtgattcctagccctctcaagatcactgctttctgaagaatttgcaatgactctggcttctggctgcttatctctggacacccgttctccaccagttgtacagttcatgtaatctacttggcttaattgattttccacttctctcttcctcttctaagatataaacattttaaatgatttattcctgtttcttattctggtgtttctttccttgtccctatgagataagtgtctcaactcactaaatctattcccaatgtataaaataattctaattccattttcagctaaaacatatattaccaagaagaaacaaactttatcctacagaatgatgttaggtagaaatatgtccccaggtttgagacctttcggatgatttcatataccatctttcttctgagtgttacccagtcaagtataagtagccaaattatttttgcacatctttctgtttctcatgtcttcatttattcaacaagcacttactgggaaggtctacaactgcataggcaatgctggaaaaagggttaagtaaaccaggacatgacaatggtggcaaatgactatcaggtcttcccatgtgtttgactcaaacttattaccctatggtccttctgacaatggcagaaggtctgaatccttgatgctaaacttatataaaagtagaattattacaaaggaaaaagaaataaaaactaacattcattttcatatgttggatgaaatataaatgaagaaaaagataacatcaattttaactgtaattctccatccaccagtaacagatccttaagacaatagaatcatacagtattcaaaccagcagccttctcaaatttgagcaaaaactctatcaacctctggtaaagttcctacactagtcacagaaggtgttaactttctactctgattctgtctccataatggggtaaactgttgatagtttaccccatcaacagatggtcggtaaattattgattcgaagaatcgagagagtgcagcaacataaatctgttaatgtctgatcaagctcctgccctgttctccgaattcagcttcataattaagggaaggcctgttttctatcctcagatttaggttctagtagcagttgtgtaaccactagtgagtcacttaactcctctgggtccccatttctcatgtgcaacaagaaagaggggaactggagatgatcactctagttccagacaagggaacatttcacactttgtttacttcagggtgatgtccctgagtcctcattagtgactgcgtcctttggaagttatcccaaccctgcttttctcaaaagtgaaaatgtataggctctcagaggagacagatttaactctgcttctctaatgttattgaattaaaagctgttcacattagtggttattaaatattgaaataacactgggaagaaaaagcatatataaatacagctaaaaacaagaatagatattcattctcacaaagggagacagcaaagaaaatggaaagtgcactggtgctagcgttagacagcttgtgttaatgtctcaattctgctactaactggttgcagcttgtgtgaccttgggcacattgtatgatctcgcagaatatcatcccaaatctgcaaaatggaattggcatcatctcttttgcaagattgttatgagaattaaaaggttcttcattcaatataataataaatattttgtatataaatgaatatcaattaaaagttatgactaattccacaagtcaaacatataaattttatttcttgattcatgatatgtgatagtattcataaaaatgtacatgcatgataatttcaaggaataagtatatatgtgagaatcatggaaatgaaattaataatattaactagtaattaaattgtaattttgtcttgagtcttcttaaaattaggaaactacttaaagtacattttttataaatgggcataaatacagacagtatatattttccatggatatattttcatagcagaggaaccaactagattctttctcaatacaactgcaactatttctggtcaaattatggggaaaaggcctgttttgtggttgatctgttacaaacagggtgtaacttcttgtaacgcaaagataatttgtctggaattcatccaccactgaaaaaataaaattaaacaaggatcatgatcaaatcaattgaaatttttccaaatttaagcaataacatttcatcttactaacatagtagattattgtaactttatttcaaatgttcttagaaaaagaaaagcaaaacaaaacaaatggctgtacctcctttatgctagccacttaaccctttgactatactatattatgtaattatcccaaaagccctgtgagtcattgatgtccttgttttacaaaagaggaaactgaggcacagagaagtgtctaaagtcatacaactagcaacatgtgagtttggaagtgacacccagctctggctgactccaaagcccactttccttctccttcatcataacttctaaagtcatatttattattagttccaagattgcccatgacatataatagtgaggtatttcttcatgatctaaaactattatcccccattaagaagcctgagacgtcaagttctagaggcctcaacccaggataagacttaactctgaatctgaactcgaaatgtgactgtgtgtgtgtgtgtggcgcggcggggtagggtgaggcggtgagacacagagctgcaggaagcctatgggctggctggatgtggggtttgtggggaacagtggattgggggaggcaagtgcattggtaggcaagaggaataaaaaggagaaatgggaaatacgtgctatcagtaaaggaccaaagttcagaaagagaacagtaagtctggctccttgggaagccctcgattgttatagccctttatgtctgtggattagccctcaattcagttcttttctggtataagcagggtatttgccagcatgatcatctttcccctgagtccttgttcagaattgcaatgatccaggaagaaacatcaacagattttcttcactgttggaactaccaaaacaactttcttcagaggatacttcattttcttccagctactttcagacattcaatatcaggattttaattgtcacacaccttttcttgcccatactggctctcaagtaattttgaggctaacatatccatcacatacacaggtacaaaaaatgaaggaagaaagaaagaaagggaggaagaaacataggagagacggagggaggggggaagcaagaaagcaaaatagcaatcatttttattcatagtccttaaaatacagtggtaacacaactccaacaagtggaaatatttcattaattggaaaattggctacataataatttcaaaagacataattacatgaccacaaaataatctgacatataaacagtttgcaaactgttacagttacttctatatctatagctgtgtgcagtgaaaattgttgttcaatatgatgtggaggcaatccaacatactgaatcacctacaaaggattaagttttattttaaaaaagaaaactggcagatacatataagaaaagtttttaaacaaggttaaataataactttaccaaagtgttctgcctaacaggtttaatggaagtattcacttttgtactattagcatcagttactattttagctgctccgaatttctatcacaaatgaatttcaagcaagatctagattttcttcaacaaatttaacaacttcttaaacattttaaagaggagtctacctttataaataaaacaatcaaatgtattttaagtgcttggaaattataaagcacaataaatatataagctattactgttgctagccagtccctagctacagcaacagtttgacattcctttccccattgctcacactgccgcccacactggagatttcagtctaagaattacctatattcttccccaaaaggagtcaatagaagtacgtgatgagaccacatatttgagaatgcaacaatgtagcccttccttactagaagggagtaaggatatacttcacttccttctagtatatctgcattgttttttttctgtagctgctggcaatggagctatatcaaacatggaactagaggtgcaactttactttgtacattgtgtgatacccaaatacaataaaataaactaccactaaatgtggaatcttgaactggagacatttctgagtcagttaacgctaccacatacggtctccccagaacacgcacattccaggttggtcccaatctcccaagaggtagaaaatttggtgacaactccgtcaactatctggctatgatgatctcaagatttgaaaaaaagtaaaaagaattctgatcccaaaaagaaaggaacccttattttcatccttataactactcagtgacatgtactgcccctccaccagaatgacatgccaaaaacgagtgccatgccctggggcactgtgctgtccctggcagcagtccgtccatccttttgacttccttccctacttctgttctacactttgcttatttatggtttttgattgactagtttgggaaggaaaaaaaaccctacctaatgatttaaaaattaacctaggaataaactggagaagacataatttaataaattcctcgaagtatagagctatggaaagaatattatttatacttctttttttttttttttgagaaggagtctcggtccgtcgcccaggctggagtgcagtggagcaatcacggctcactgcaagctccgcctcccggggtcatcccattctcctgcctcagcctcccgagtagctgggactacaggcgcctgccaccacgcccggctaattttttgtatttttagtagagacagggtttcaccatgttagtcagcatggtctcgacctcctaacctcgtgatccgcccgcctcggcctcccaaagtgctgggattacaggcgtgagccactgcgcccggccccatttatacttcttaaaagaagtttaataaaaataaactagaaaacaaaaatagaaacactttgtgtttcacatacaagggattttcctcatgtggcaactatttggaagaaggtcctatttatcactaagttcacccttactgatctttttcccatagtaaaaaaaaaatgattatgactcactttatgaacacaccaaatgctacaggaaaatagattttagttttatccaaaccagcagtgagaataatttatgattccaaaaaagacatagacatgcagagtcaatttaggaaagtgagtcagtttcatgcaaataagttctagctttcttgattgccagtctccttttaatgttggaattttagggggggaaatgaattattgtggtaaaccaacaattccacttgttaactatggaatatttaaaggatagcttaatatgtacatgtgaaagggtcaagagaatagagttttatttgaatatccagatgatccaattaaatccaaaatggtattatttctagaacagaagagaccattagaatgtgctgttctagtatctctagaattctcaaatttattatgagaattatcctttccacaattgtcaaaatagattgtttggccataaacatccttgcaagcctaagcaatttgaaattcagggcctatatcagtttccttgcctccacccctttcacccccaaaagaaaccagtcaattagataatggataaattaacactatattgacaagcaaagaataattagaaattaataagcataaagagaaatgactgtgtaaaaaaatcacttgtttcaggtttaatgtagtcactttgggacaggaatataaaacatgaaacatgaaaatagtcagcagatgccctttccatccattaataaagtatcttttaaataaataatcaatcaacctatagattctgccattaggaaattagcaacagtgctttgctgtaccagtagagctatcagattagacaatcttcatatgtataggtgacataacattctcctaaaattttctatcaggtttctagatggaggttaaaagccttgtatgattttgtaataattgatataccaagcctggcatccacaataaatattgatgttttccattctgtaaaaatgatataaaacatattagtgcttttatagttatgcaactttgtatgttttgataccaaaaaagatccagaaaatgtgaaaatacagatagttatctaagtatagcttcaccgagattgggtgatttaattatcaatttgaaggaaaactcttttatctgtaacaatgatcataactgaactactgaactggccagcaaaattaatgtcttgatctgccactcaagcagtatttagtcattattttcaaatgactaaaattaaataaaataaactatacctttgagaatcattttaactgaagtagccagttataagggctagccacaggcagtgtttacaaaatgtctctttaagaggtgtaagattatttcagatccacaaagaaaaagcagcagatggtcctgcttttcccttgtatcacttgaaacatacaagacttaaatattaagttaaaagtgtattgagaatacttcagaaaacaaatctatgcccaaatcactccttaaagcatggaaagaaaaataatgctaaagtggaggaaaataattaaaagtggaattccctatatattctaatttgcaagatgaagcttcactcttcctgcaaaatactacattatgggtatgaagacgccacaccagtcctaaccaaaacatgtctcagcccttctccagccttcaccaaatatcacattgccagcttctcttttgtcatgtccttgcacttccacaaattggatttcccatcagagtgttagtacactctgatgaactcaacaaagcagaagtaagaaaaaacaactttaaaaatgttgtttttatattacaaagcaatgtttcaaataaatgttattcaatattactgaaatggcattgaaatagtcataatgagaaaagtgagaacttggttgaactttcttatactggttttacaatttaattctgtgttagtttgcaatacattaaaaaaaggaacgacagaatctttcaaaatccttggtccagtcctactgcacaaacacaagcacctactgcctcccttctctcccgttagtcaatcctaagccttgcctgagaaatatcagtgattctgtcaaatactacagactgctctctatcctgagtgccttgagaaggtctccagctattccagtgtcacctttgacaggaggcaaaggtggtaagcaaaggtgtcaaggccctgtcatccattctgccttgtgtttctttcatttcctgtacagggtaactgctcagaaaaactcaactatttctcacaggacaaatcatataaaaccttacaggattaaaaaaagagagagagaagcgcttgtaatgaaaagaaacgaaagaaataataagagaacacacaagaggaaaccagtcacacccattctctctagtgctatgtagcttaacccacacccaaagtaaactgccttcacttcaagaagctgtctctctgtaaataaactgaccaatgtatctttaagacataaacatcttggactgccataataaacattgcaaaataaatacaaaataacatctggaggcaaagctttgctaggagtggggtgagagggagtgctagcttttcttagcaccattaataaagtattaatttcattttcttttagtttggaaaatgctttccattattaaccaaaaacaaatcaaagacttactgattttactttaaaatccaaagaatggaatactgtctgtccataatggctttttgcaagttgggcttatcttcttagttatattttaattcccttgttttctactgtttgaaactagcactcagtcaccaagcagttaatttagatatgaaaatggtttatatttaggtctaattattactgtcctgttacataaaaatcttctttctgtcttgggaaaccaatttctccaatataatgtaccagaaaaacacaatacttccattgtaagagtatattataatgattatgacattcaaccattgtttctcattgcaatggcagagaccatgtttcatgcacttcctatcagcatccgacttatgtgtagttatcccattcaattaacatttatcatcggcaaacagcaactggtccagctctctacctgtacaaaataattacatcaaatgcttgagttgctcctagtaaattttactataatattattatgtagataattgccctaggaattacttctcttattttgtgtaatgctctggtaagattttttgtaggtgacatagaaagcattgtattccaatgccaagaaaaaaaaaaaactcattagaaatatatgtaacttacagccaggcgccatggctcacgcctgtaatcccagcactttgggaggccgaggtgggtggatcgatcacccgagtacaggagttccagaccagcctggccaacacggtgaaaccccaactctactaaaaatacaaaaaattagctgagcatggtggcaggcacctgtaggcccagctaattgggaggctgaggcaggagaatcacttgaacccaggaggtggaggttgaagtgagtcgagattatgccattgcactccagcctgggagacaagagcaaaactctgtctcaaaaaaaaaaaaaagaaaagaaatatatgtaacttatgagtaaattataatacctcctaaaaaccattatacctaatttacaataactactactaataatgacaaaataaattatttgaaatgtatataccctaaattatttcttgttcccaatgtataaatctttatttttataaaatgaaataaacttgttaactatcaggggaacagtaaatgccttccatttagtcaaataaatatgtaaggatatttaatctcatataagtgttttttaaaagtatacttgtctctctttccataggaagtaatgtctggcagaggaaaactgctgagctatgtctgagatagtttcatctgctcacaggctgctcctgatggcacatatttattgtgtttctcacatggcctaaactataccagcaaaatgaggaattcagttttccttttaaaaaattttccttttgaaaataacaggcattttactaaacattcctttttttcttattttgattagccaaaatgccagttgcaggcaggctacataaaggatattctaaattccagaccctctttcatcagatattgcaaaggctgaaagtaagatcaaatttacccaagccacaagttgtaataaatttaaaagaatcatctttggcttccattattagtcatttcctctctttcaacaaacaataattcaacaaataaaaattttaaaagttctgtctattttaggctttgcagatagaaagacttgcatttaaatctctttattattgaccgtgcactcttggaaaaataatttatttgattctccatatattcatatataaaataaatataatatttttacagactgtatagagttgtgaagattaaaggaaactatgtggcatgccaagtatgtactgggttcccagtaaattgctactaattaaaatgtatgtgctttgcttaaaatagaatttccaagtcactctgaaacagaaatatcgatatttctgttatatataaatatatataaatacaatcatgtaaacacacatacatacacatatatttccttcaataatcaatctttctataatatttaatttaatcaataggtatttacagtatatctactgttcaccaggcaacatgcttgatacagataatacaaatccacaaaataaaattcttgtctttgaatcttcctactaggagaaacacataagatacccaaatgctatgagggtattttacctaagtctgtgcctcctggtgcggaggtcaagaggaatgagcccctaactcaggcttggatgcaggagcaggagaggatgagtgtttagtaacgtgagctaattcctcaatcatgagtacttctttggcagtgaaacaaaataggaaatgaatgtcgggttgggtatcacaggccatgagaaaagcctggcataaatgagaatatgcagtttggggaattacaagtagtttctgtgttctctggcaagagatttgcgaagtgtgaacaggaaacagatgataaatggccttatatgttatgggaaagagtctatactttatcttgaaaacagtgatgagtctgttaaggtttttatgaggagcaatgaaataattctatttgtcttaaaagttgcctttggtgacaatgaaaagatggatttttaagaatgaagaacactcggatgagtaatagttttaagtataggagtataaaattgtatagtcaacttcaaaataaaaagaacc

SEQ ID NO: 794 - DNA, 1959 bp, Homo sapiens
ccctcccccctccctgccctcctcctcctcctcccctatgtggtgctcccgggagcccagcccaacactggagcgtctcctgctcgcgcacgccagaagcagctcggggtctctccgccgccccttgccgctcgcccgcccggatcccgcctgcggcagttgccgcacaacatgctacctgcggccgccccggcggctcctggaaccccggttcgcggcgatgccagccaccccagcgaagccgccgcagttcagtgcttggataatttgaaagtacaatagttggtttccctgtccacccgccccacttcgcttgccatcacagcacgcctatcggatgtgagaggagaagtcccgctgctcgggcactgtctatatacgcctaacacctacatatattttaaaaacattaaatataattaacaatcaaaagaaagaggagaaaggaagggaagcattactgggttactatgcacttgcgactgatttcttggctttttatcattttgaactttatggaatacatcggcagccaaaacgcctcccggggaaggcgccagcgaagaatgcatcctaacgttagtcaaggctgccaaggaggctgtgcaacatgctcagattacaatggatgtttgtcatgtaagcccagactattttttgctctggaaagaattggcatgaagcagattggagtatgtctctcttcatgtccaagtggatattatggaactcgatatccagatataaataagtgtacaaaatgcaaagctgactgtgatacctgtttcaacaaaaatttctgcacaaaatgtaaaagtggattttacttacaccttggaaagtgccttgacaattgcccagaagggttggaagccaacaaccatactatggagtgtgtcagtattgtgcactgtgaggtcagtgaatggaatccttggagtccatgcacgaagaagggaaaaacatgtggcttcaaaagagggactgaaacacgggtccgagaaataatacagcatccttcagcaaagggtaacctgtgtcccccaacaaatgagacaagaaagtgtacagtgcaaaggaagaagtgtcagaagggagaacgaggaaaaaaaggaagggagaggaaaagaaaaaaacctaataaaggagaaagtaaagaagcaatacctgacagcaaaagtctggaatccagcaaagaaatcccagagcaacgagaaaacaaacagcagcagaagaagcgaaaagtccaagataaacagaaatcggggattgaagtcaccctagctgaaggcctcaccagtgtttcacagaggacacagcccaccccttgcaggaggaggtatctctgagtgtgcagcacagaatcgcatgacccaccttaaccttcctgttgtcatggaaggatgcacggctgctctgtccactgtgattcctagccctctcaagatcactgctttctgaagaatttgcaatgactctggcttctggctgcttatctctggacacccgttctccaccagttgtacagttcatgtaatctacttggcttaattgattttccacttctctcttcctcttctaagatataaacattttaaatgatttattcctgtttcttattctggtgtttctttccttgtccctatgagataagtgtctcaactcactaaatctattcccaatgtataaaataattctaattccattttcagctaaaacatatattaccaagaagaaacaaactttatcctacagaatgatgttaggtagaaatatgtccccaggtttgagacctttcggatgatttcatataccatctttcttctgagtgttacccagtcaagtataagtagccaaattatttttgcacatctttctgtttctcatgtcttcatttattcaacaagcacttactgggaaggtctacaactgcataggcaatgctggaaaaagggttaa

SEQ ID NO: 795 - protein, 292 aa, Homo sapiens
MHLRLISWLFIILNFMEYIGSQNASRGRRQRRMHPNVSQGCQGGCATCSDYNGCLSCKPRLFFALERIGMKQIGVCLSSCPSGYYGTRYPDINKCTKCKADCDTCFNKNFCTKCKSGFYLHLGKCLDNCPEGLEANNHTMECVSIVHCEVSEWNPWSPCTKKGKTCGFKRGTETRVREIIQHPSAKGNLCPPTNETRKCTVQRKKCQKGERGKKGRERKRKKPNKGESKEAIPDSKSLESSKEIPEQRENKQQQKKRKVQDKQKSGIEVTLAEGLTSVSQRTQPTPCRRRYL

SEQ ID NO: 796 - DNA, 2813 bp, Homo sapiens
ccctcccccctccctgccctcctcctcctcctcccctatgtggtgctcccgggagcccagcccaacactggagcgtctcctgctcgcgcacgccagaagcagctcggggtctctccgccgccccttgccgctcgcccgcccggatcccgcctgcggcagttgccgcacaacatgctacctgcggccgccccggcggctcctggaaccccggttcgcggcgatgccagccaccccagcgaagccgccgcagttcagtgcttggataatttgaaagtacaatagttggtttccctgtccacccgccccacttcgcttgccatcacagcacgcctatcggatgtgagaggagaagtcccgctgctcgggcactgtctatatacgcctaacacctacatatattttaaaaacattaaatataattaacaatcaaaagaaagaggagaaaggaagggaagcattactgggttactatgcacttgcgactgatttcttggctttttatcattttgaactttatggaatacatcggcagccaaaacgcctcccggggaaggcgccagcgaagaatgcatcctaacgttagtcaaggctgccaaggaggctgtgcaacatgctcagattacaatggatgtttgtcatgtaagcccagactattttttgctctggaaagaattggcatgaagcagattggagtatgtctctcttcatgtccaagtggatattatggaactcgatatccagatataaataagtgtacaaaatgcaaagctgactgtgatacctgtttcaacaaaaatttctgcacaaaatgtaaaagtggattttacttacaccttggaaagtgccttgacaattgcccagaagggttggaagccaacaaccatactatggagtgtgtcagtattgtgcactgtgaggtcagtgaatggaatccttggagtccatgcacgaagaagggaaaaacatgtggcttcaaaagagggactgaaacacgggtccgagaaataatacagcatccttcagcaaagggtaacctgtgtcccccaacaaatgagacaagaaagtgtacagtgcaaaggaagaagtgtcagaagggagaacgaggaaaaaaaggaagggagaggaaaagaaaaaaacctaataaaggagaaagtaaagaagcaatacctgacagcaaaagtctggaatccagcaaagaaatcccagagcaacgagaaaacaaacagcagcagaagaagcgaaaagtccaagataaacagaaatcggtatcagtcagcactgtacactagagggttccatgagattattgtagactcatgatgctgctatctcaaccagatgcccaggacaggtgctctagccattaggaccacaaatggacatgtcagttattgctctgtctaaacaacattcccagtagttgctatattcttcatacaagcatagttaacaacaaagagccaaaagatcaaagaagggatactttcagatggttgtcttgtgtgcttctctgcatttttaaaagacaagacattcttgtacatattatcaataggctataagatgtaacaacgaaatgatgacatctggagaagaaacatcttttccttataaaaatgtgttttcaagctgttgttttaagaagcaaaagatagttctgcaaattcaaagatacagtatcccttcaaaacaaataggagttcagggaagagaaacatccttcaaaggacagtgttgttttgaccgggagatctagagagtgctcagaattagggcctggcatttggaatcacaggatttatcatcacagaaacaactgttttaagattagttccatcactctcatcctgtatttttataagaaacacaagagtgcataccagaattgaatataccatatgggattggagaaagacaaatgtggaagaaatcatagagctggagactacttttgtgctttacaaaactgtgaaggattgtggtcacctggaacaggtctccaatctatgttagcactatgtggctcagcctctgttaccccttggattatatatcaacctgtaaacatgtgcctgtaacttacttccaaaaacaaaatcatacttattagaagaaaattctgattttatagaaaaaaaatagagcaaggagaatataacatgtttgcaaagtcatgtgttttctttctcaatgagggaaaaacaattttattacctgcttaatggtccacctggaactaaaagggatactattttctaacaaggtatatctagtaggggagaaagccaccacaataaatatatttgttaatagtttttcaagttttgttcactctgttttattgtttgttttattgagaaattcttactcttagagactcatgaattaagaaagagaattctgctaactcagagaacctggttcctatgtaattcagaatatattacatttctcagtaatatttgttttttgaatccacctttatctgagccaatggagatttacttatagcgtattaggagatatttattccattttcttattttaatcaacattctaattatagacacatgggcctccctagctgatttcactgctcccccttcattgcttagaaatgggcatcatttcttgtatgtcagatccccctgcatcttcaacatttagtcttttcttctccatattttctatctgtggatctctttaggggattgaagtcaccctagctgaaggcctcaccagtgtttcacagaggacacagcccaccccttgcaggaggaggtatctctgagtgtgcagcacagaatcgcatg

SEQ ID NO: 797 - protein, 272 aa, Homo sapiens
MHLRLISWLFIILNFMEYIGSQNASRGRRQRRMHPNVSQGCQGGCATCSDYNGCLSCKPRLFFALERIGMKQIGVCLSSCPSGYYGTRYPDINKCTKCKADCDTCFNKNFCTKCKSGFYLHLGKCLDNCPEGLEANNHTMECVSIVHCEVSEWNPWSPCTKKGKTCGFKRGTETRVREIIQHPSAKGNLCPPTNETRKCTVQRKKCQKGERGKKGRERKRKKPNKGESKEAIPDSKSLESSKEIPEQRENKQQQKKRKVQDKQKSVSVSTVH

SEQ ID NO: 798 - DNA, 2686 bp, Homo sapiens
ccgctcgcccgcccggatcccgcctgcggcagttgccgcacaacatgctacctgcggccgccccggcggctcctggaaccccggttcgcggcgatgccagccaccccagcgaagccgccgcagttcagtgcttggataatttgaaagtacaatagttggtttccctgtccacccgccccacttcgcttgccatcacagcacgcctatcggatgtgagaggagaagtcccgctgctcgggcactgtctatatacgcctaacacctacatatattttaaaaacattaaatataattaacaatcaaaagaaagaggagaaaggaagggaagcattactgggttactatgcacttgcgactgatttcttggctttttatcattttgaactttatggaatacatcggcagccaaaacgcctcccggggaaggcgccagcgaagaatgcatcctaacgttagtcaaggctgccaaggaggctgtgcaacatgctcagattacaatggatgtttgtcatgtaagcccagactattttttgctctggaaagaattggcatgaagcagattggagtatgtctctcttcatgtccaagtggatattatggaactcgatatccagatataaataagtgtacaaaatgcaaagctgactgtgatacctgtttcaacaaaaatttctgcacaaaatgtaaaagtggattttacttacaccttggaaagtgccttgacaattgcccagaagggttggaagccaacaaccatactatggagtgtgtcagtattgtgcactgtgaggtcagtgaatggaatccttggagtccatgcacgaagaagggaaaaacatgtggcttcaaaagagggactgaaacacgggtccgagaaataatacagcatccttcagcaaagggtaacctgtgtcccccaacaaatgagacaagaaagtgtacagtgcaaaggaagaagtgtcagaagggagaacgaggaaaaaaaggaagggagaggaaaagaaaaaaacctaataaaggagaaagtaaagaagcaatacctgacagcaaaagtctggaatccagcaaagaaatcccagagcaacgagaaaacaaacagcagcagaagaagcgaaaagtccaagataaacagaaatcggtatcagtcagcactgtacactagagggttccatgagattattgtagactcatgatgctgctatctcaaccagatgcccaggacaggtgctctagccattaggaccacaaatggacatgtcagttattgctctgtctaaacaacattcccagtagttgctatattcttcatacaagcatagttaacaacaaagagccaaaagatcaaagaagggatactttcagatggttgtcttgtgtgcttctctgcatttttaaaagacaagacattcttgtacatattatcaataggctataagatgtaacaacgaaatgatgacatctggagaagaaacatcttttccttataaaaatgtgttttcaagctgttgttttaagaagcaaaagatagttctgcaaattcaaagatacagtatcccttcaaaacaaataggagttcagggaagagaaacatccttcaaaggacagtgttgttttgaccgggagatctagagagtgctcagaattagggcctggcatttggaatcacaggatttatcatcacagaaacaactgttttaagattagttccatcactctcatcctgtatttttataagaaacacaagagtgcataccagaattgaatataccatatgggattggagaaagacaaatgtggaagaaatcatagagctggagactacttttgtgctttacaaaactgtgaaggattgtggtcacctggaacaggtctccaatctatgttagcactatgtggctcagcctctgttaccccttggattatatatcaacctgtaaacatgtgcctgtaacttacttccaaaaacaaaatcatacttattagaagaaaattctgattttatagaaaaaaaatagagcaaggagaatataacatgtttgcaaagtcatgtgttttctttctcaatgagggaaaaacaattttattacctgcttaatggtccacctggaactaaaagggatactattttctaacaaggtatatctagtaggggagaaagccaccacaataaatatatttgttaatagtttttcaagttttgttcactctgttttattgtttgttttattgagaaattcttactcttagagactcatgaattaagaaagagaattctgctaactcagagaacctggttcctatgtaattcagaatatattacatttctcagtaatatttgttttttgaatccacctttatctgagccaatggagatttacttatagcgtattaggagatatttattccattttcttattttaatcaacattctaattatagacacatgggcctccctagctgatttcactgctcccccttcattgcttagaaatgggcatcatttcttgtatgtcagatccccctgcatcttcaacatttagtcttttcttctccatattttctatctgtggatctctttaggggattgaagtcaccctagctgaaggcctcaccagtgtttcacagaggacacagcccaccccttgcaggaggaggtatctctgagtgtgcagcacagaatcgcatg

SEQ ID NO: 799 - protein, 272 aa, Homo sapiens; identical to SEQ ID NO: 797

SEQ ID NO: 800 - DNA, 1970 bp, Homo sapiens
ccctcccccctccctgccctcctcctcctcctcccctatgtggtgctcccgggagcccagcccaacactggagcgtctcctgctcgcgcacgccagaagcagctcggggtctctccgccgccccttgccgctcgcccgcccggatcccgcctgcggcagttgccgcacaacatgctacctgcggccgccccggcggctcctggaaccccggttcgcggcgatgccagccaccccagcgaagccgccgcagttcagtgcttggataatttgaaagtacaatagttggtttccctgtccacccgccccacttcgcttgccatcacagcacgcctatcggatgtgagaggagaagtcccgctgctcgggcactgtctatatacgcctaacacctacatatattttaaaaacattaaatataattaacaatcaaaagaaagaggagaaaggaagggaagcattactgggttactatgcacttgcgactgatttcttggctttttatcattttgaactttatggaatacatcggcagccaaaacgcctcccggggaaggcgccagcgaagaatgcatcctaacgttagtcaaggctgccaaggaggctgtgcaacatgctcagattacaatggatgtttgtcatgtaagcccagactattttttgctctggaaagaattggcatgaagcagattggagtatgtctctcttcatgtccaagtggatattatggaactcgatatccagatataaataagtgtacaaaatgcaaagctgactgtgatacctgtttcaacaaaaatttctgcacaaaatgtaaaagtggattttacttacaccttggaaagtgccttgacaattgcccagaagggttggaagccaacaaccatactatggagtgtgtcagtattgtgcactgtgaggtcagtgaatggaatccttggagtccatgcacgaagaagggaaaaacatgtggcttcaaaagagggactgaaacacgggtccgagaaataatacagcatccttcagcaaagggtaacctgtgtcccccaacaaatgagacaagaaagtgtacagtgcaaaggaagaagtgtcagaagggagaacgaggtacaatcatagaaaaaaaggaagggagaggaaaagaaaaaaacctaataaaggagaaagtaaagaagcaatacctgacagcaaaagtctggaatccagcaaagaaatcccagagcaacgagaaaacaaacagcagcagaagaagcgaaaagtccaagataaacagaaatcggggattgaagtcaccctagctgaaggcctcaccagtgtttcacagaggacacagcccaccccttgcaggaggaggtatctctgagtgtgcagcacagaatcgcatgacccaccttaaccttcctgttgtcatggaaggatgcacggctgctctgtccactgtgattcctagccctctcaagatcactgctttctgaagaatttgcaatgactctggcttctggctgcttatctctggacacccgttctccaccagttgtacagttcatgtaatctacttggcttaattgattttccacttctctcttcctcttctaagatataaacattttaaatgatttattcctgtttcttattctggtgtttctttccttgtccctatgagataagtgtctcaactcactaaatctattcccaatgtataaaataattctaattccattttcagctaaaacatatattaccaagaagaaacaaactttatcctacagaatgatgttaggtagaaatatgtccccaggtttgagacctttcggatgatttcatataccatctttcttctgagtgttacccagtcaagtataagtagccaaattatttttgcacatctttctgtttctcatgtcttcatttattcaacaagcacttactgggaaggtctacaactgcataggcaatgctggaaaaagggttaa

SEQ ID NO: 801 - protein, 274 aa, Homo sapiens [sequence omitted]

SEQ ID NO: 802 - DNA, 119854 bp, Mus musculus
  misc_feature (1)...(119854): n = A,T,C or G
ccaaagcacatatactaccacagtccaactttgagaactatgagttttatgggggttacatacaggaacatgggtgagaggttacttactggagcaaaagtgattcagcggcagctgtatcactgaatcccatctgagcgtggaaacctgcagcacattacaaagtctacaagcagctcaacaggttaaagagtgccctccaggcgctttagttggtctaagcctcttcccaggcagctgctggtttctggttctttaaggcagccctgcctgatcttagagtcctccttgtagcttttctcctctgagagtactcttcccagctcagctcggttacctttcatcttacggggactctttgcttttactgtttactaaggcaggaaggacctacagaatctggttggtcagtttcagggactttctgaagctcttttgagctgtttaccttcctgcttgaggagctgctctgaaggatggaatgtttcagtctggagaaaactgttacataacatatacacacacacacacacacaaatatacttgtccacacacacaaaatgcagacatgtaaaatgtataaatatacatacatacacatatatacatatttaaatatacacatgtacaaacattaacataaccatatatacgtgttaataaatgtgtacacacagattatgtatatgtgtattgttatgtttgcatacatgtgtatttatgtgaatgtccatgtttatatgtatatatttatttgtttgttcatgtatatgtctatgtgtgcatattgcctgtttatattgtacgtctgtatatctatatgtgaacaagggcataattatttttatatgtggacatgtgtatatctttatgtgttaacaaatctgtatgctcatgttggtatgtgtacatgggtatattaatacttgtttacacattaacatttatatatgtgttcacatggtgcacatttgtgtgtatatgtggatatttatgtgtgtattcatttgtaaactcatgtgtgtatatgagtttatatacatttatatgtatgcacatgtgtatttatgtgtatgttgatgtgtatgtttatgtgtttatatcagaatgcttatgcatctgtatatttgtatatttatgcgtgtgcatgtgtattttgtctgtataagtgtgtataactatatttgtacaaatgtgtatattatttgtttacacatgtacatttatgcatgtgtatgtatatatttatgtagttttgtagatatttatttttgtgtatagacttgtatgtatttcattttatgcatatattcatgttttgggtgtgttcatgtatatatttatatgtgtatatattatatgtatgtgtgtacatatgcatgtttttatgtgtatgcatgtatatgtttatgtgtgtacatatgtatgttcataaaggtatatacttgtatatatttatgtgtacatacaggtatatgtttactgtgtacatgttcttatttatatgtgtacatgtacatattcatgtatgtgaacatgtatatatttatgtgtgtacatgtttatatgtgtatatgtgtttatatttatttgtgtgtacaaatattatgcctccctctgatttcagaaagaatattcaatactcagaggctttgcctgaacacagtaaaagtatatctcttcataatcttgtgttattcccttgtaatattgactatggcctctacatatctgtgttattttcccattcatgtgttcatcactggcccctcttgctttgttctaagcatcatgagtgacaagtctcattttgtttgttttataaggagtcactatgtcagtgcttatacattttgatgagcaaatgaatgaatgaatgaatgaacaaattctcttccaccaaacatttgatgcacattttacaggttacatacatacctacaagagactgtgccttcagtctgggagtggtgcagctgggtccacagaattgtggacttttctcaccagaatatttcatctcgaagggagctgattctgggcagcaaacgcagcttggatgaataacagactaagtgcccaatgggaaactggatgacagagattccagtgttcctacctcttaaagaggtagccctgccagcgtgtggctaaggattacatccaactccaaattccaggctgctcttggggcattgcacacaaccggtaaatacccagtgatcatcagaacaggcttgtgattgtttgggcaaggaaaggaaacccataagcttgagaagaggcctgatattttaggacctcctttagaggttgttctaatttgggacagctggaatgacaaagccctttctacttcccttacacagtgtggccggatttggaagatttttgtcatttctcaggcccctactgctgcccacagcagccctcattttcttcactatttaaaatactgccttccccactgataataagctggcagccagaagccctctctgtgattctagaatgacagtttctatagagaaaacttggtgatatgaagagagccctgaaacagaagtcagaagtgggaaggcccatgaacctccagccagacttaaatgctcttactggctcacagctgcctcccatggaaggagggatttgaggttgatgatgatttgggagttgggaggttagaatttgaccctgagtcagctgctattttgcagtgtgagaacttatcaagaccctttattttctggaagtcttggttcatcattcccacatgatgtatttggaggggctagggcttaaggtcatcctaactgtgtaggttccattaagctacctcattaccaagcaaaaacagagatataaagccctgaaccaatccttcctaataatgaccattcaatagtgacctgtcctgttttgacattttttttcctttggtagaccattcaaagaattgcttctttctttgaaattgtatttgcctatcactcagaagtcagcacaaaattaatacagttaccataaaagcatcaatcagaggtcattttagtcttaaagaactatatacactcaaaggcacctcaagtagagagaggaggctggtgctcactgtgccaaatgctcctcagtcctggtactgccctctggcaagtccaggctgtggcgaggaggctcatcagagggcacagagtggaaggaatgtgactgtgctgctggtctagaaattctggcagtggagtctcaaggacattgtactctcctgttcttcacatgaagaaagaccgttgaggaaaaacagatgtataacaatggtttttgaatggtcgtgaaatgttttttgaatggtcatgactagtaaggttttggctcaaacgctttataagattgattttgcttgtgatgttcgtcctaccaagaggcaaatcaggacagtgagccaaaataccttaactgaacctacgcagctggaatgatgagggctgaatctaggattctttattacaaaattgtctgtcctaacaacaacagctataaaaataataataaccaaagtggagagaatcataagaagtgatagaaacctttgtgttcctgagatctaaagtcctccaatacattaccttggtcaccttgggcaaactatttgactaattagagtgacagtacacttcctaatggcaagagaacaaccaatctttacttcacagtataatgttaaaggactgggtatagcaagcgcttcctgttggttcctaacatgtaataaatgctcagtaaaagtcactgttggtgttattgttactagtaccacttccatcttcctcccaggattgttacaaagctgacaggaaaaacagactgggaaagttctatttgctgtgtgcctgtcagtcatccccgtttggacaactatagaagtctaagggaacgcatttattccagaagctcagaccccattcctcctcaaaatggttcaaattctttgctctgctgccaacagtgatgacgagcaagagtttgactcagtgcccactgtgaatgacgtccttcaacatctcaaagaactgtgtagcaaatgcttttttctgagcttattttaacatcacagggactttgtagctggcttttaacgtttaacatcattatttagagatggtgcttttcaatgaatataggtttgtgacacagggcatgctgggaagacacgaccttagaagcaagctaattctgttattggtcgctgattttgagaacagtggatgtgcattgaaaaaaaaatatgggaaaatgcagaaatatgtggagaaaaatttagaacatccataatgcagtcaatcaaaaacaaagaatgcttatagcattctgttattttgactctgtcctttactctgtattgtccttgtccatgtattgcataattttgatcatacctgtcatataatccatgttttccacaattttttaaaactggaatatgacttcacctcatgttctgttttagattcaatttttatttttatgctttagaatgctgtctttgtctctctttatgtctttctttctctctgtctctcttaactccccccacccccaccccctcgtgcaggtatctctccaagcccagaggaagatgtttaatcccttggagctgaagtgaagagcagcaagtactcttaattattgagccatctctgcagtccatagatgctttttgtagatgcttcatattccaaccaagaagcatagagtgcaacatatttaatcaattcctcttcattgtttaggtttttctattttttactaaccttttcccctgtctgaggcaggatatctaggctggtcttaacatctgcctctacctccactgtcttgggatcataagcatctgccatcatgcccagcattccatttttgtacatcactacatatatgtaattatttattttctttgagaagaatcttgaaaatgggaaataagagtcagagaaaatggacaagtttgagacttcctataaggcttcaatttatcggtttctacagtcctaacaactctccgagtgacactctctggtcagttccaagtatatctggtttttagaacttgctgatgccatgcaaatcagaaggtttagaaggaaagcaatccaccatcttgatttgcaatgctgattgcatgcagcacttcatgctttttagttactgtgtgtcctttcctgagagtggtctgccagtgttctttgctggacagacttgattaatggtaactctgttaaccctatggcaaaagatgccaaaccttgcattcagctacatctggtaggagaccaggttcctgcagcactagtaagagtctgtgtcagctctgatgtttcagtaaaaccagaaagggcaaagtgtctgtgctttattacaatatggaagaagctgtatggatgagcctctgctatcagatttttatgctttgtgactctcagtgcctcttttcttaaatgctgctctagcaggagggagaaatgtgtctgacctttctttagtatttgcttttgacctactgctatgtgcaacaccagtagtcacatcaacagactggactatagagaagagaattagctttgaagtcaggcagatcttaggcatgtctaaaccttttagaggtttactttcctctttttttccccccagcataggtgatagttctaaccctaaggaatgaatgtgttcctgtttttgtggtgttgatgatcaaacccaaagtcgtatgcatgcaagcaatcgctctattcagctttcagagtgcaaaacagtaaaaagtgcttgtcccatcacaagactcttatctgcaggatacctaagctggttctgcagatttcatgctgagctggtgccgtgcacaaagtggaatcagactaaaccttcttgagtatttgatcaaacagactgtaagcaggccttctctgaatctttgtgaccattactcccatggtaaaatggcagctccctttggagcaacaggaaaagtactggaagtcattctgatacataatgtcagggccattacttttgtcttctctttcgaacatgatatcatgagcattttctagttacagtttgatgccagtgtgaatccagccactctcacttgctaagggaccttaggcaagctgcttaacttttctttgccttagcttgtttatctgtaagatacagataataaaatgctgcaaagtgaatgctgtgtctctctataacttgtgagatgaaatcctaacattatccctatatgggatctggaggcctttagaaggcaataggtcagcagggtaaagcacttgtgaatgggatcagtgtccttgtaaaaaacaccccagacagctgctttgtcctttcaatcacaagaagacagtgaaaggatggaatctgtgcacttggaagaagtctcttcccagacactcaacaagctggtatcttggtcttgaatttcttagccaccaaaactgtgaggaatatcggcatggtttgtaagtctcctagtttttgttatagtagtccaaacaatctaggacatatatttgggggtggggggttctaaaaattaaatgaagtaattcacgggcctctgttaggactgtgcctggaacttgcaatctctattacatattattgatatctgctacatatccatgatagtagatcctgatagtgatggtatataattaaactgaacagatgtattcctatgtatgatattagatatttatggttatttttctgtttttaaatataaacttacaaactaagtcatgttggtcatgatgtaattcaggaagctaagttagggcactgtcatgagctctaggctaaactggactctatggggagttctaggccagtccagattgtagagtaaagcactgtttcagaaaacacaacaaaataagccatcttgtagtttgtggtatagagataaaagccaagcagtgagtttaaaactttgggctcgttagatggcttacaagataaaggtaagtactacctttatgcctggcaacttgagtttaatatatgaaacccaagtagtagaaagagaggagagtcttcccccaaatgcctctgacttctacatgtgagccaagcatgtctgtgttcatgtatgtacacatacaatcacaaacaaagtgaacaaaattaaaagtaataaaaagactcaatgttgaagtaataataatatatctaagttatcttacaggccttgattattgatggttctttccagtatccacgcgtgtggaaggcacaccgaggccagtctaagctacaaagggagactgtctcaaaaatatcatcttacaaaaattcaacacttcctagacatatttttggctaattgtcccaactgagaagtcctgtatgaaatgtccttgtccaaggcacagcagccctgaatcactctgcaaggtttctaggcctttattctgggatcctcctgacannnnnnnnnnnnnnnnnnnngcctttattctgggatcctcctggcaggaaaaaaaaaaaaaaaaaaaaaaaaaaaagccaaatcagctttccccctctagcagtgaagaatctctgatacagcacagctcagggccaagccagcagtttttagataccatttggaaatatccagtagagcaaatgtcaagccttgtcacctgatctggagtttttgggacagaggtttctgctgtagtctttcagctaacaaaactcagggttagcaatagcaattgaaacgttaagtgacaatagagtataattggtgtgtcaaaaggctctgtttaaaaaaaaaaaaaaaacagttctgtttgatctgtttaaagaattaatggcctcattttaaagacaaggaaactgaggttcagagaggaaacttgatccaagtctgtggctctaaaggacccaagctttccttccctgtgagcacaacaggatctctttcagattaatcagcatgttttactgctcactgctaggcactggaacatagagctgggtgaaatagacaggcaggggtattaatcacaagttctagtcctgaggttgctgagtgcccaggagaagtaattaagtcatgtgggtggttcattttatttgtagtacttatgtctaaaagccatcattaatccttttaggaagaggcaggggttgatagatcagggttataaacaaaggccggtagggaactagggagggattaactcccactcagaaatccaagtcctagaggatgtggcattttggttggggctgaggaaccaaaagaatacaggggagggacacaccatgtccactcccttcctaaaggcaagtaaaaatagaactatggtcaattcttgctaaatatttgtctttagaacagttacatggccctctcatttagtcccttatttcttacataggtaggcctctaaagacacacccagaaacaacctcacattgaaaaacagaaaattcacacaaaacacacaccagtgtgcatgcattaatatcttaaacatatcacatgaaaatacaagttcttatatttgcagactcacacatacaatcttcacagagagacttacaaatgtgtttatgctttcatacacaagctccaacatatcctctccccacccactactcactcaggcaaataaatgcatgcttttgttaacacacaggagttcacacacaaatctcatcctgcctgtctggttagaggagaatgactaatgggaaatcatgcacaaaggcaagcatcctaggagaggccacgactgggtttacagtgaggctgttgggatggaattaagccatcagatgacaaacttgtcctgccagattgcacctaaaagttgctcagctgaggctaccatgtcccgcagcgctggatcctgggtgatggtgcaagtttgcctgcctgatttccaacttcctccagagtttaatgtcatccagggtcaagctctgttatcagcccaaccccaatgcaggcaacaggcaggaatctctggggactcagaggcaatgcgggctgctttccaaccttaggcttgtcctgacatagtgcaaccccaagtggttagcattaatgacggtttacaaccgtgggccaagcattgggttaaacccttcaagtacatgatttcattttcacaactctgtgagggggatggggtgtgccctctcatctcaccatttacgtggttaagaaaactgcttgagccacaaaaccactcagcaagagagacaaggagctgaaattcaacctggtcatattctattctttccgaggttctgagcataaactgtgcatgccagtttgtctcctccacaccctcttgtgctcaggatggggctccaggccgtcccatctggcttagtgcaggcccatgccatcagcaggtgcttagtgggggcacagaagttggcttgctgaagccatcagcaagagctttaatttccccatctctgaaatggggttgacagtgttgataccgcagggccaaggccggctgtcttgagcaacagagtgagagccgagctccatctaatatattagctgccaccaccctcgcccgtcgcggggatgtaacccagcccccgcccgagtccgggtgcggttccggcgcccccattgttcagaagggtggagacgctgtccacaggggactccccgccccgggtccagctcgcagcccagtggaacagatgatttggcctggaatctgccgcgcgggccgcgtcctttgtctgctcggcggcgttggatgcccaaggcccgcgccccgctctgtgggtagacaaagccggagccgcagcgaacccagccggctccaacacctctcgcgcctcccgacgtcccgccctcttcccttggagtcctctgattggtctgcgccgttacaaagaggccggggagcgggcggatcacgtgggccaacgcggcttccgattggccaggcttcgctgcctatcgaggagggcgggcagtgcgcgctccgcccagtcgctccctccgcgttgaggcccgcccgcggggccggccgcctgtcagagggaggtggcgatggtgctcttggtggcggcagcggcggcaacgctttccttggtcggacggcagggaggagaagatgactgaccgatcgactggatgaatgaatgaatggcggagccgagcgcgccatgaggagcctgccgagcctgggcggcctcgccctgttgtgctgcgcggccgccgcagccgcttccacagcctcggcagggaatgtcaccggtggcggcggggccgaggggcaggtggtcccgtcgcccagcccggggcttcgggaccaagccagcagccccttccctaagaccgcggctcccaccgcgcaggccccgcggaccggtcccccgcgcaccacagtccgcaaaaccggggctacaaccccgtcagccggctccccggagatcattcctcctcttcgcaccagcgcacaacccgctgccacccccttcccggctctggacctctcgcccgccaccccttcggaggacggacacactcccaccacggaatcaccaccctccagacccgcgcccaccacccttgcgagcacagttggccagccgccgaccacctctgtagtcaccaccgctcaggcttccagcactccagggaccccaactgccgagtccccggacagaagcagcaacagtagcggagtcccgcccaccgcacctgtcaccgaagcccctacttctcctcccccaggtgagtcctctggaccttcccccaggcactgcctatttacacaccggcctcgtcaccctggccgcttcttgcccaagagcttcccaagggaagatccgagctccagttaaagtaaacccccaatccctccaaatctagaaagtcttttgtcccccaacctggtgccatgctccatccagagggagctgctgctatatggaaggcttagggtctcttcctaaaacagggttttctggcctttgtcagagtcccagaatggacacaaacttttgtattggatccgcccagaaggccaccctacctgggatatttgggggaaagtttgaaagctaggatggtgctttatcaatgcgcaggtaaaaacctttacgggattcccccagatgaacaatgtagtttgcttacaaacagaaacggcattgtagtccgtgttttctctgcaaataagtagattttataggtcatttgggacaggtgtgtatctaggttgagcaagtttataaattaggttaaatcccttccttgcaccacttcattctgtctcagttccaaggtcagtaattgagcaaatgccatttgagcagggatgcccatctttgcccctttttaaagtaggatgttcattactgctgatgctgacatgccaatttctgtttgaactcacaataggaaatgcagctcttctgctggtgaaagtgttcaagcaaagttaagatacaactgctgttctttcacccttttgcatcttaaataggccaggaactcaaccaataaggcctacgtctttaagaaattcagcaagttttctgagatcttttgctttgcattggggtggagatttgcccagagcacttacttgtctagcttgatctgattgttgacctaattcttaggctcagtggtttactgtggagtcaggtatgaagtttggactataattgagttggtagaagattttcccagatggttaagccttgaatcgtatgttggagcttggcaaaggcacaagtaggaatgcagattattcacccccaaaagccacatttggatctcttttagcttcaaggaatgtactaactagctagtttttaaacctttcatgctttttagctttttataaagagagattgacatattactaaaagttagactagtacctaagtctagactctcgagtccatttttaggtttgaattccatcttattgcccccctttgtcaacataagtatggacaggttcttgtgatcttactttcttcaaccttcagatgcaggttatcatagtccttataggtttgctgtgcaaattatgtagaatggactgagtgtgtatactacacatgtactgaggaagcaaatacaagaggatcaggagttcaaagccagcctaggctacataatacatttaatacaacctggagtgaatggcaagactcaagaaagaaagaaaaacagtagagagaggttaggagaagagagaagaaaattcactaagtcaatgtatacctaactagtgcttagaatagttcctgtgcttgataagcacctgtgtgttgtgttttatttatgaccagctctgttttctgattcgaaaaatatggagaagccaagtggggatttgtgacttctataccttgttttagtaaatagaaaaaggatgagttagaatgtctggagttttaagcacataatatttaactagcaattgcttccttttgatagtatctgataaacatacagttaatgtcatttcacttttgacattttaagaacacaaagataatccttattgccaaaaaagataatcagaaacctaaaagaaaatgacaacagtcattcctccactgctctctagttctggttcctagtggacctagaggttactcctcatagcagtttgttccatcttaaaagttttctttctgggcatatatcaacacagttgtattttcaaataagctttagggctcaggggtagaaacttgtttaatatgaataatcaccatcaaaacttaactagttagtaatttgtaaaattaaaatggaaatatatatatatatatttccatcttgatatagtcacttaactatgtaacataatttttaatttttaaaaaatttttttcatgtaagtaccttggttctgcctgtattccttccaatagtatttttcattgtaaatatggacagagaaagtggacttgtttaaccagtttgttattaattcatttaacagttccatatatatatatatatatatatatattgctttgaaaagcacagagaattcatcatgtatttattatattctctgatagtttgataccaaatcagcacttagaatttaaatcaattttaagtgaaaccaaactgggttcatggatatttaccatttgaactgtttttcataatttctataggccataatttctatatggctgtctttctgtagcaaacacttcaggatatcaaattgaggtcattcacctttgtgtaaatagtgtgtcacttagagtcttctgtgaattcatttacagaattgtctgtgtttagttctcagtagcttgactgactttgtggcctactggtattcaattttagccttacagtgatatattcaaggtgactttttaattatcgcatggactccaatatactttagatagtaagtatagctcttcagcagaggaaaaacttctatatgaatttgaaagagctgatttggcttgcaaagctggatttcctgccattgggcaagatggttgtagaattttatttcaacatttctatgagaactggttaccgtctaatatatcttttgattgggaaggtcttttaaactgctataggaatcagtaaaaaaattccttcctagagatttagctgaaagctcttactaccagtcagttgggatcccattgtttacacaggacactgatctacaaactgaaactagttacccagcaagcacttttctctcacaaacctggtataacactatactgattggttggataaagggtggatggaaaagctgtgatcttactggagagttataatcagcagtaaggccctgagctagtgacaaatgctttcgtgtttgttttacatggactaattaggatcctagaacccactaaagcccagcataactctacattttaagaaatacttctataggcttaggtaaaagtctctgccttagctaacatttgactagatggattgtggcctttgaaaacatgtccaagtctgttttcactgtgcacgtcttccgatttgaggggtgtagttgtactcttgagtacaaataatagctttgcttcttcaattcgtctttctttcacatggcttcatatttcttcactatcctggtcacctctattctgaaccttttcagctttctgtaacttccctagaacacagagcagagctgaacccaatagtctagatatactccagcatagctcatagcagagagagcggttaccttgttctttctgggtacaatactgattttgtaattagtcccctaagcacagcatttttttttttttggtttattggcagcaaaattgtgtggttgactcactgaatacatcaagatatctaactattttaacttatgcatttaaaagatacgtgttagataaatcttcttttatctggacttaaaagtgtttgtgatttttctaaaatatctgaaattttccatgctcttcagattgattatgttaaattcagatgcttgttagagctcaaattgtactccacccaggttgttcacatgacctgcagggtgttcctgcaaatcacgtctaaggacgagtcagggcaggctattcttgcctcactgggaagaagaaatccatggacgttaaaacagtttggaagggaagggataatagcgtatgttagttctcaagggtctctttcagctcttaagttctgtgatgattaaatgtgcatgattcaaggcacatttataccttataaggagtcttaattatttacttatgatcaagactacaagaagagactttggttaagcaagcctcagaagccagtttgacgtctctagcttctctgaggtatggctacaatattacaaatggattctatttgatttgctttatttgcttggtttagtataagaaagggtctagctgtagctcaggctgacctagaacttgctctgtggctcaggctgacccctaacttgtcatcctcttgctgctacccccttggtggttggaggtgccactatgcctaacactttagagttcacttgaaaagaaaaaaaaaacattctagaaatgcagggtcctcctagctggacttgaagatggtttcgttagcccaacggtctccactgttaaagccagagtgctattacatgtagttatttgtgactaactaacatttattttctggaaataaaaacgctataggctccaaggagaagacaggttcaaagccttttatcaaaaacctatgtgtataggttatagagagatatactgtgtgtagatatattggagagcttttcagattttaggaagttaacctaatacatcctggtgtagcttggtgaatatctagtaatcagacttatgaagacagtcataataatatgttcaatatcaacaactcagtgtgggctaagaatcttgagtagccttgtctttgatcaagccaggttttattgtcattcatattcaaagcagggcttgcagaatagacagcctggttctttacctatcttgtaatacatacaagcacttccttccctgccttggataaggtttcactatgttacctaggttggccttctattcataggcttaagccatccttctgtttcagtctaagtaactgcaattacaggagctcaccattgtgtctggattcttaataattttcttgaataattgttgggcccagaccttgcatcacctggcccatatttaaaaaacacacctgagcccaagctttgcttgtgggaatttggcaaaagcaaggtgaagcaaagtcctggcttgagcatgctattcctgtggtgaatatttctttatgcctgcctgagaagggaactaggtggtccaaggcaggctcttatgtcttgagagagggactctatgccagtgattctaaaagctgggagctctctataaacactttttaacactttatgggttactgctcatcagagctgcagtttgggtgtctatcctaagccctgtcccttccctagatcagttgtagcttggttctaaaattgaattgcccttgttaccccctttgcatcccaataaatggggtaggttagagggaaaatatgggcatttgtgataagacaggtgggcactaagaacaccctgcacagccttcttatctgaagacagaatgagagtccagtgggttcgctgtctcttctaccttagagacaggagagtaaacgttaacaccataaaaagattaccagtagcggggacctcaccctgctttgttagaaggggttcacctaaggctaataaagcttaaatcccctttgggatctgttctaaattttggtatcttttgctactaagagtagcaggaaaaatacttaattttagattttctactatttagcattaggtttgagggttgtggaccactaaaatagtaattgcaaacatgctgtcttaaattcattatgtggtttcatccttagaacagtgaggtattattagatagtatgatcctcattttttttcctggtgctggagattaaatccaggcccttgcatatgataagtacaactcctcctttgagctgtaacttcaaccctgttttataaataaggaaaatgagacccaattctctttggtatttactgtattgtacactgctcatcgacctttaactttttgttttataatggtttatggctgtgatattaaacaatagctcatccttttgattagggttcatcttgctttgatggatgtatttgtatgaattatctttaggttcagtcataaggacttcttatattcactgtatattattcctggcctaagtgcctactggtgtgtataaatttcttagtctgattagtttctggaaaataagcataaactccataacattagtttagagtcttttgaataatgtctccaggaagccttctggctagttgaaaatttacacattggaataatctgaccaggtctttttatcttgatttaactaaagactcataaaattaaagtgcattacttttcatcttagcattctaaacatgtgtgcattatccttccagacgtcctggcacccttataaaaaaaaagaatggaccgaagtatttcagtgctgtttttactgatgggtaaattatgggtagagagatgactgcttgagggtacttcatagagcagaagcaaatagagagagagaggatcttgtttagtggaaagaaattagatgctattttttaattacatatatctttattttatgccttttaccttggtcttgacttttttttttgttttctttagatataaaattctttattgttaatttcagcattatattacaggtatttctgtggctacatttaggtctttttaaagtatagattttagtttaccatttctttagtagaaacatctataccatctgcataccatctgcacttgcaactttaaaaagagattttgtttatttgtgataaagaaaataatccatatgtgcttgaatcacagtaaatgtttgctcaaaagtagtaacctatcaggtccttttgctcaaatacatccaataaatttatgtcaaaataactgccgttgtgatgccactcttccccaggtagctgtcagagaactcttccacgttcgtctttatctgctcatgtttccagtgcaaactcctccatgtgttgctcttactctgtctcattcatgggccctacccttctttccctgttatttaagaagccaaattaccctctctagtgaacaatttaccactttgtcctccttcaatgcatcctcaaagcctgattcttccaagagatctttctagatgaacaaaaagtccttgaagatgtcttggtatcagggtgcacggagttgaactctttttgtgcagaacaaaacctctctttttttctgtgactgacttttttccatatatatatatatactttttaagcaacaaaatataaagtattttaagtagcaatttcctttttctcttatgaataatattggctattcttgatacactgctttggtatatgaggcttgtgttgagaaacaaattgtgttgttttgatcttttgaatgacagaattttccttgtagaaatacaattaaagttaatagtgaacagaatgcttctaataattaacaattatggttttcaaagtgttcttagaatcttctataactttccatctaccttgaggttaattactttaatttctgagtattatatgagtgtaaaaggcttagcttctgccctctattgattctgttattggtaagttgataagtttcacatttgatcatttttattatctagctgttgtccttggagtttatttgctgagtttaatcctttggctggttttagtgctcatatttaaatagcagaaagatggtaataagagattaggattgtctacatttctttcctagacactagctggtcctcaatgtaataaaaagaacctagtcataattaaaaataaatggtatgggaaatagcaagctatggaatttgattgggaaactcaaataaatttctcttcttttaaaattttttatttagaaataggaatggtaaaaatctgtttggaaatatcttttttaaaattttttattaggtattttcctcatttacatttccaatgctatcccaaaagtcccccatacccacnnnnnnnnnnnnnnnnnnnntagcgttcccctgtaatggggcatataaagtttgcaagtccaatgggcctctctttgcagtgatggccgactaggccatcttttgatacatatgcagctagagacaagagctccggggtactggttagtacatattgttgttccacctatagggttgcagttccctttagctcttgggtaatttctctagctcctccattggaggccctgtgatccatccaatagctgactgtgagcatccacttctgtgttagctaggccctggcatagtctcatgacagacagctatatttgggtcctttcagcaaaatcttgctaatgtatgcaatggtgtcagcatttggaagctgattatgggatggatccctggatatggcaacactagatgtccatcctttcgtcacagctccaaattttgtctctgtaactccttccatgggtgtttttttttattaggtattttcctcgtttacattttcaatgctatcccaaaggtcccccatacccacccaccctcaatcccctacccacccactccccctttttggccctggcgttcccctatactggggtatataaagtttgcaagtccaatgggcctctctttgcagtgatggctgactaggccatcttttgatacatatgcagctagagacaagagctccggggtactggttagttcatattgttgttccacctatagggttgcagttcccattagctccttgggtaatttgtctagctcctccattggaggccgtgtggcccatccaatagctgactgtgatcatccacttctatgtttgctaggccccggcatagtctcacaagagagagagctatatctgggtcctttcgcactgataagtggatattagcccagaaacttaggatacccaagatataagatacaacttgccaaacgcatgaaattcaagaagaacgaagaccaaaatgtagacactttaccctttcttagaaatgggaacaaaacacccatggaaggagttacagagacaaaatttggagctgtgacgaaaggatggaccatctagtgattgccatatgcagggatccatcccataatcagcatccaaatgctgacaccattgcatacactagcaagattttatccatgggtgttttgttcccaattctaagaaggagcaaagtatccactttggtcttcgttcttcttgaattgcattccctcttcaattgcattgccccaaattacatgcaattccagcagatttgctggaagaaaaagagacttcagccaggtatggtggctcacgactttaatctcagcacttgggaggcagaggcaggcagatttctgagttcgaggacagcctggtctacaaggtgagttccaggacagccagggttatacagagaaaccctgtctcggaaaaaacaaaataaaacaaaaaaaaaaaaaaaaaaaaaaaaaaaaacccaaaaaaccaaaaaacaaaacaaacctcccctccaaaaaaaaaaaaagaaaagagacttcatttcagctttccgttctagtcagatatttaacactgtggcaacaaatataactgagtacttatatggtcaatttcttgtcaggctttaaaaatatacatcatttgttcttaaacaataaagaagttaaatatcatcatccccaacttatagatggcaaatactgggactcagaaagcttaagagaaaaggagaccagtgagatgactcagatcataaaggtgatactcaccatgcaataacttgggttcattcccttgaacctacatggcagaaggagagcactggctctcatgagttgacctttgactccacatgtatgtataagtgcactctcatatgtaagcatgcttacacaacacatctacctctccagtaataaatatagtaagggggaaggagagaatagactccctcagttgtgattttccccacacatgctgtagtacatatacacaaaattaatacatgtaatttttaaagaagtaatttacatttatatcaccattgaatagcccaaatagattttcagtatttagtggccaaatgaatgaaggaagtgtggtggtaattagagtaagcatgcagtttattcttgaggactataacgtaatcatggccttctctcttaaaatgaacttccctctagtttttcccttttgctcctattaatagagcatgtggaactctgagagcttatatattacactaattattcatttttattacatgacattgtcctttctatttttcttggctaaaagaaaaacaaaatagacaaatgagaatctgataatttggggggaaagaatagctaagttagaaagctgagttcttgtatataagatatggactttggagtcattttactaatctcatgatttgggcaaataatttcatttataaaatgagataagaactttgacttataaactgtgttatttgggtacttgcacttcctcaagttgttttttctgtttgtttactgtatccaattttgattttatagtcatactataaaatgaaaacaatggacaaaagttatgataagcatgctaaatctctatgtacatgagattaagtcaatgatctgacacagagtcatgtaattggcttagcaagtttggtcagcatctgagatacttgctcagtgtcagggaaatgccattctgaagaaagcatctgtagaggatgctgtctgagacaggaagcctcctgaggcctgacaaaaccacacaatttaggcaggcagagatgacggattaaacgtatttttcttctttaggaaagattagctgcagtctttgatgaaaactgaacataggatattgggtcttttctccattttatctaaagaatttgaaccaaacactttaaagttaattttgattaatgtatctgaagaggatatttgattcttatctttcaccttctataaaaaatcaattcaaaatggaccaaagacctgaatttaatacctgaaacaatgcagcttctaggagaaaacataggggatacccttttagattttgggatgggcaagaacattttaatagaacaatgatatcacagaaactaacttcaagtatcaatacgcagggcttttgtgaaaattaaacgtttctatacagcaaaggaaacagcagagcaaacaacccacatagtgggagaaaaaaattttaccagctgcacatcagacaaggggctaaaatccagaatttacaaagaattgctcaaattaaatgccaaggaaataaaagtgccaatcaacaaatgggcaaatgaaaatacatacttttcaagaaaagaaacacaaatggccaatacctatttttaaaaatgctcagtatctctagccattgggaaaatgtaaattaaactattttgaaataccacctcagccttgtcagaatagatatcataaataaatatgacaacaaatattggacaggatgtggggagaaagaaattttattcaccagtgatgaaaactaatacaaccattgtgaaaattagtttgaagatttctcaaaaaaattagaaatagaactaccacatgatcccactatttcattcctgagcatgtacccagagaattctgcatcctaccacagagatatttgcaccctcatgtttattgctactttattcactatagtaatcagcctagttatcaatcaacaaattactgtataaagaaaatttcctatatatatttctattcagctgagaagaaaagtgaaatcacagatttgcaggagaatgaatgcacttagaatctatgcttttaagtgaggtcacaaaatctcagaaagaacagtcaaatatgtccttcctcatgtccagaatctagccaatgatctatggaaatgtctaagcactgtgcacatggggactgtatagcacgtagaaaagaagacaagaatggctaaatatttggggatggggaaagattgaattcaggtaatggacacaagttatgaaagaggatttaaagctaattgtttttctagttccaattttgtgatgtatttttcatttttgatatgtaaatgaataaaaatatatttggtaataagactgtgaaatccagggtgcagctccagagcttccatcccaacgctatgctgactgttcattcagttatacagctgtaaggtctgcttaatattggtatatgcttttttattaaaatacataaataaaactttaaatgagaaaattttaaacttatttaaatagacactgtttaaactgatcaatatttgaattcatggcattttttaaaactatattttgccaataaaaatctgatttttttccccttaaagatacagtgcacactagaagtttggtttcaatatgcccatatgttttgcaattagatcagatggggttgcttttatactggtaatagaacagctgttctatatgctgccttgccagggagacagctaaagctccaaggaaaggagaaatttattcatttgggagaaggaatgtgttctgcctagtcaaagagaaagtgataaggagcaggaatgttttcaacttacaagaggaatgttaaataaattttagttacccaatgttatgcccttgagataactgattttgaaagcttgtttcagtattacattgctcttagcaactagcatatttccagggatctttttatattttcatggtttactttaaatctgcagcttttacttggtgaatgtgggcaaaggggtaagcggtgagcagagcacgagagtccccaggttcttttcattgtaatgctcattaaagctatgtatgtatgcacacacacacacacacacacacacacacacacacacaagtatagtctcagaaatttttggatattggccactctgaaggaaattgggtgaactgaatagctttttaggttttcttcagtcttgtcaatcatttgtagaaatgtagtctaggtgtgaaaatggctactggaaataatggggggcaataggaggggtcagcatttcaacatgccattttaaagtcttatttttctattgaggcctagttaaaagaagatatcaggcctttactgctgtacatttctcatttggctttatgtaccttacagtcttagttctgagcatacaacattaatagtacaaacccaccacccactaacaacgtgtgggataatgaatagctagacagtataccaaacacacaaagcaatttggctgttgggtattattatactgaattgttggtgtattgcctgcaaacctatcccgtttaactggttttaatttctgtgttagtttgttgcttcaacttgtccacaaatgcaggactgagaggttcagctaatcagtggaatggaagtcagaaccaaattccagcccttctttcattgattttacatattattgaaaggactttctaatggtcttatgtcagattctctatctataaaatgaaatatttttccagtctcccaaggtttttgagaagtaacacataacttaatttgggtttttctcaaaaaaaaggctttatagagtttaaactggtttctagtgtttttttttcaaattatatggtttatatttgccttttaaaagcaaacaaaacgaaaaaccaaaaaaaaaaaagcaaacaaaaaaccatacacaaatttatatgtgagtttatatatgttacattttataatatttttatttactttcttgaataataaattgtgctgttgtttttaaagtttgggacacttcagtgccattcgttgttgattaccttgatgaaataaaacataataaatcaggctttatatatctttaatattattttaattgatttttgtctgcttgctcatttcaattttgggacaggacctcattatctagcctgaaatttcactgtaggatagccttgaacttaaatcttactgctccagcctcttatgttctgagattataggcatgggccactaggcctggatcatggctgtcctgatttgaatggatccttctttaccattttaatgttcaaatgtataaatatatgttttagaatatgaaagcaattgcaaagttaaaaggtgaactcagatacattttagtggtaactgcagatattttttataccattattattttcctccccttccctgccactgatataattctgtatgtatctcatgcacaaaaaaccattctttcaaataacttcacaaatttgaatattttaaagtgagatggcttctaacagaagttgtaagtagagcctttagtgttattatgttaatttagttaatcaaacactgagagcttggtatgttcaaattaccatattaggtgcttcctaatacttacaggggaaaaattatcctataaacctttttatcgccaactttaatattttattgctatgcatatcactcaatttttcatagcagtaaatgagatcacttatttgttaagagaacaaaaatgcaagttgaatttagcactctggagtcaaacataggacagatccacgtggaaagatttaccacatttaaacgatttatctgatctcgataaagagtacaaatgtactttacatagtgactaagatgatttgcttggtgttctctggcctagccagatcagtgacttgctcttgtgtgtctctccaatacaaacataatacaaacatgctttttttttctgggttcaagtggcccctaaaaacctaaagcattctgacaccaagcctggcatgtaatagtttcagtcctgtggtaagaaaccagggtgcctacctgcccagctcatgtactgccaaaatgtgtaggtgctatgctgaggacatggcttaaaagtagccctggccttccaaaagccgatataccatgatctgtacttactgaattttgaactgtgaagtctatagtgaatcataatactgttgagaaagaatttaatcatttaatgtgtatggcagtgttaaataattggcactgaagttaatagatacctcatattattcactcaaaattgtcattattatttatattgttttataacctatcaataatgttagtgtaacatcaggaaaacgtaattctagattaataaattagttatcttccttgacagtctgacaagacttttataattaggaagacatacattgtcacagatcaaatttctctaatacatgtttttaatatgcagggtagaaccagtgttgttgcaaaggctatgccctgtcctttagaagggcccagttcaaatgagactcatcgccaaatgtgacagcactaggctacctgaaagctaattcaaaaggcaaatgtaagcacttggtgtaaggggcaggaggctcatgatgccaagaccagttagagagagagccagagagagagaaccagagggggggagaaccagagagagaaccagagagagaaccagagagagagagagagagagagagagccagagaaagaaagagaatcagagagagagaagagagaatcagagagagagaaccagagagagagagaatcagagagagagagaaccagagagagagagagaaccagagagagagaatcagagagagaaccagagagagagagaatcagagagagagagagaaccagagagagagagaaccagagagagagaaccagagagagagagagaaccagagagagagagagagagaaccagagagagagaaccagagagagagagaaccagagagagagaaaactagagagagagagccagagagagagagacagagagggagagacagagagggagggagggagggagggagagagagggagagagagagatatccagaaccaacagcaataaatgcaatatttcaggaatagcaattggcagtctgttaaatgtacatgcctctgggatcttttgttaataccaggctacaaaaggcctagcaaagtgaaagagtctgtgagttcaactgtattggtttcacattgtttcttagaagataccaaatagactctgcatgtacaagttatacaagttacctggccttcaacattaccctgtaacatgaatatagtaatgcttacttaataaccctatcatttaaacccagctcttcctgacttcaaaggctatgcactttttctctgactaaattgtgttgcattgccaaagcagatgggagaagcagaaaatggaataaagcatcaagtgggtacagaacccattttggcttctgatttttctcaccttttctagcctcctccagcaagctcatattttttctttctcagcacttggatccagttgtacatagtgatgcatgtttgctttcagtagctcctacaaaactcaaaattagatcaaagagtctttctcaaagtcagatatgggtggagtgggagtaacgccaggaggttgtggtaagaataagatgaggacaaacaggtggatgagcatggaaaatgtaaactagaagcaaggagtgactaccagatggttggggctgacagatgaccatgtagtgcttgttagaatttggcaagtgaaaccacactgtgaaatggaagtattgattgttcttgactgacaataggacctttcataattaacttaatatgaactctaagatcatgatgctaatgtataataacactatacaaaagtcacaaacggtcagatgtgcaaatgtgaatgagacttctgacagtcactttaggttgcagctctttccccatctaatcaacttcttagtgaaaagttaagtttctttcaatcaaaggaacagttattttcagttataggaccagctcaatctcatccactcaaaagacattattgatgcatcacacgtaaaattttggcgggtttgtttgttaaaaagaatgaacaaatagcttcagtttgtggggaattgatatgtaacaatagtgctatcatacctgctagtggacaagagcaatggtcaggtccaacatgagatatatagggcacatatatacaatgaaaaacctaatcatgtcagtctcctaattaataatttaatatttagactctgatataatagtcctattaagcacagtaagtaaccccatcccataaagcccaagctgtttaatatgacttaaacgtcttcattatctatctttgtcttcatttccttcatccttcaacttgtgctttagactccagtagaatctgactgccatatattccaccatatacatacttactctgatcattaagagtactgaaggaagcagtcatctgtgaaggtctttttctatgtcagacactaagctttagatgagttgtgtgaccttatttaatactcagaaagtataataagaaatagcattatcatccctgctctgttatgctagaatttaagttttaagactttaaagacagtgaacaaaatttcatagctattaaaatgtagaatcttgatttacattcagttctttctagcctcaaagcctgttttcttaatcattaagctaactagactattttgctttgtttatgccattcttctgcctggagtgtctttctctttagtttaaataggagtcttaattgtaagtatcagaaatcaacacactgatttaatcagaaattgagtttattacaaggatttctagggaatcagaaaattgccaggggaacccaatgtaggccataaagctggcagtgatgcctgatgatgccaccaaatgggctgctgacattgctcctgagcgttggctagagcttggtgagaatactagtacctgggttctgaacatgagagtcggcccttctgccctttgtcgtatacatcatctccgcagccaggaggacctcacgctcagtccttggaccttagtttccctgattgcagggaaggccagggatataagactctgacttaaaccatttgatggagaatccgagctaaaaatatgcataaatcctctacatagaaaaagattctgaaatatggagaaattttaatagcagtctgttgaaaagaatgccagatgtcaaatacctctttcagccacctaacaaaattatttgcctttggaaaacaccattcatgctgtcttttatgcattttatgttctaacgttactgaatgtatgttatgattacttgcttttaagggattcttgttttaagtgtcagttgtctctgtactggctctctgtcttcttatttaaacatgcatgctttattgatgtttgcactttgacatcatctcatctttagcatgaaaggttccactgcactgacgtatacttactacctaccactctaggaagtaagttctacaaaggcagaccccctctcaagcacaggctcctacattaggtcctggtgtgtggtagttcctcagtaactgttggagaggagaaaactcctgaaatcaattatttactttgggaaatgaaatagtagtcagaaagacctttgaatgagtggccagttcagagcattgtgtcatactttccaattagaccagaacaataagtgagtggaaagagtcttatttatatttggtcacctcttcctcttatccagaagtataaccagaaaagggtaattggggacttccccagacctgttactatggttggtagccacaaaaatggcctgaggaaactatagttgcacttttatgaacccattttccccttctccattataaccagccacatctgtgattatcatcttttctgggaagaaaagctgttaggcaaactgtcttgaatttatgtttttttttaaataacccattagaaaattaaaaatagttgaagagatatcttaggaaaatgcttgctgtgcaaagatgcaacctgaatgtgatagtcagtaccaatgtaaaaatccaggagtgatggtgtgggagtaagatacaggagaatacctgcagtatactgtgaccgctctagctgaatcatttagttccaagttcagagaggaagtgtctgtctcaaaaagtaatgctgagagtgatcaaggaagacaactgacatcatcctctggaagatacacacatgtacacacacacacacacacacacacacacacacacactcaccctagaagaacatgtatatacacacaaatggtaaaattaaaattaaaaactctatttgaagaaaggaagtttaatactgctgaaattaatttgcataagcgtattgggatagtagaaatgcagactagaatttttagttgttagtttttctaatgaataaaagtaaaatttagtgagactgaaagagagcttttcaagttgatagttattgtcaatgatagttactatctctggatcaaagctgttcggttataatttgggctgtgatacctatagtatcctcatctatataatgggagttattatatggattaaacaataacttatacagcacttatgatttctgacgtaaattggccttgtgttagctgttccttttactactatattttgaatacctgtttccctttactacttccaattctcaattattctgtacttataatccttccaagtctgataattagtgatgtactatctttgcaatggagagccaaaatttaaaatgaggttaggttgcttacccaataatcttgtggctgggaagtgttagttacaggattcaaacccagatgtatcatgtttttgaagtcattctatcatggcaaatttacatgctataaatagattaaacataatgttttctattatagtcttccttccactccagttagttaaatgaaatcattcactccctcaacatatctacttctcttttttcattttttagtctttattctgtctatattataaatctgtttactactctctttagcttttctcatgatcatttgtatttgtggtagaaaatttgcatattgtctgagacaacaaaacatattgtctagctctacaccatttttattttgcttgcttcttgttgctgctgctgctgttgtcactgttagcctaactggtctgtatagtggatttgtttccagaggaactgttatgagtcagataagtaaacatacattatccaggatgtcaattaaggaaaaatatcatatatccaaacactgagggccattttagctggtataaaagatgagacataccgtctctcagagtggaagacagtagcaatgaagatacttattttgcaatcttggcatgaaatgttatgttcattcatctttcttaaagcttgttcacagacacttggaaaatttcaagaagattctagatatttgtagaaaggaaatgagaggagaggagaggagaggagaggagaggagaggagaggagaggagaggagaaaaggagaggagaggaggaaaggagaggagaaaaggagaggagaagaggagaggagaagaggagaggagaggagaggacatgacagtagaggagannnnnnnnnnnnnnnnnnnngaaaggaaaggaaaggaaaggaaaggaaaggagaaaggaaaggaaaaaggaaaggaaaaagaagaaaatggaaaggaaagagaagaaaaaggaaaggaaagagaagagaggaaagaggtaaaggaaaagaaaaggggggaaagagtttcttacatttgctgtttctactctgaagcttttcatagcacactccaacccagtttttagcaagtcttttaatggcttatcagaaagccaacatttgtatttgctgtacttcttttagtttttaatctgtgtaacagagtatacatttataaaaacatacaattaaaatcagtgctcactagttttccaggactaaagtcacaactgtcaagatgtaattaattttttccttattaaccaatttttgatattttcttccttatttgttgttaactgtacaaatttttagatcttttctttctttctttctatatatccatgctcagctataggttgttaacatgattaaacacattgcattcttacttactattactctgacgattgaacccaggatcttcaccatgctcaggattctaccattcagctacaattccagtgctgtatttatttttatttatacaatagggaaacgtgtacacttttgtgagtaacttcacattgccttactcttagttattattggcagttcttttgtccattcttcaggtctgttagttttccactggcactgaatgcctcttaacctattgctggagggacaaataagacaggatttttgtgtttgagaacacagtggaggataaagaaaattagaccacaggctagtatgggcagagaatttagaggagcaaagattcgactctccactcaaacttttagaagttctaggaggagaatgcagaaagctttctgaaggaaagttttcatgagctgagtcttgaaaatacataggaattgtccagatgatagagaaggtgaatctagggaaagtgcatgggaaaaagtagaggtaagagtgcacatggatgggatgtttgggaagtctctagtggctgagacattgtcagggtgatacagggaacagggaacggtgaagcctgaatttggaatgggtcagcagtgttacatcatgaaatgcttcagatatttattccgaaagcaatgacaagttgcagtgtaagccagaaagtaatatggtaagtttttgctttgtaaagattgtgaaaaatgcattgttcttccaaaagtgtgctgttgaccagcaaacataattagaagccactggctattttcttctcttctggctctaatttggattaaaaagcttgaactataacataataatagagggagcatggattagttagttgtctagcttctcttgttaagaaaacatttaaaacatatttggcttgttggtataatgttcagccttagatgaatcaagtaaattacataaaaccaataaaactagccattgatgttgaaccttgcaaagggcctggtgtttgtttggccaagtgaaagcatctcctatatgtcaggctgaggagagatggtagatgatttaggcatttgcagcttggtgaaagaataggcttgtacactaatttgaatattctaagtacttacatattatattcttttatatacatttcactttctagccttactgcaaacttataggatctggtaagaaaaccaaggagaaataatgaactttctaggagtcacgtgatatttaattatgtgtagtaaataaatacaattcaatatttgattttttcatttacccctctcatatttcattattttccctgacaaggcagtatttctatactttcagcctgaagtgttccccccttttaattatttccagtaccaaccaacaaactaatatatgagaaaatgttaccaaagcacttaaaagtgctcaaagatagaccctaaaagaccttagttgttagaattgccattggaatagcaacttatctatgttccaaacacttaggaaacatgataaaatcgatttaaactattttattttattcagattaatattggtaaaagggctctttcctggcacatactgggtctctggattcttgttcaggttctgagaaaccttatcatcacagatatacatacatccaataaagtatggcatgagtgtaccttaaacacttctttattatggaaaatttggggaatatgccaaagttaacataataggatcatgacttcttttgtgtctattgtctacctgggagacattttctgggccacctggacaaggcattgtctcatagatacctccatctgattaccttatgctgaatttattttgaaataaatgccagtctttctattatctatgaatatttcagaatgtattttttaaagtagtgggttctccattccaaattgtatttaaataaaacctaacatttttcttaatgtaatttaatggagattcaggaaatcattttcttttttgactaaagaattttttttgtttgcttactgttagataaatttagaaacttgattttgaacatagaaaaaaatgcacaaaatagtgaccccattttttttgctaccaatctgaactgccattaccccaagttgagcactgccttatcaacactgccacccatttaccttgctaaagcaaaaattgagctgcttggttaactggtttttgtaatataaattgatggctttgtgtcattgtctcttatgcactgttaaatatctaccatagcccaactgaggatagaggtagcaaggaaccatgggactgttttgatagtacctgctacagattataatataattcctgattgtaaggaatctgtttcaaagagatgatttatcaacatgagatcaatatgttaagtagttattgagatctgttatttgaacaatgcttatccataaatatatattaaatgtgagaaagtatttgtactccttttttgagatattatttaatgtgcataaatgttttgcctgcatgtatctaagagcaccgcaaatgtgcctcctcctatagaggtcagaaggcactgtatccccatgaactggaattacagaaggttgtgagtcacaatgtaggtgctgagaatgaaacccaagtcctctataagaacacccagtattcttaaccacagagccatctttccagtcccttatatttcttttcagatgcttattacacacataatttttacaattatgtggtttttactttaaatatctaatttttatgttcttcttcctctgtcgtaccctaacttgagacactttagagctaataaagaagatattttgatctacaacagaagaccattcgcaactatgaaaacaactcaagcaaatagtctattggtggaagaacttctcattacaaaatgttctttttaaagtccaggatatttgttgctcggtcactgaggagtctggactgccattcattagcaccctgggtgtctgagcagacctggataggaatgtactgttcattttgaatgagagaaaaggatagagaagctgcctcaaacattgcatcatccaaggcaaatattctatttgtttgatacaagccattgatcttaagagtataacctcagatacaaataagtttcattgtgagtggccttatttttcctgatttctctaggtaagcaaaattgttttatgtgtgctaggtctggtgttgtcagaaaatatgcactttgcctacctttttatttctgttgaattttcaaacccttggatctcataattacctgccaacatgtttcatactgtccatttaataagagtgtagtgctgatcgagtatggctttgatattagctcagttatatatctggaatgtttattctccagagctttccgactgagggagcccagcatgaattcctactttggaaaatatctgagtgggcaggcctgtttgccacattaccctcattgtctgtctttgtttactcagctgaaaagcagtacttgcctctacatagccaggcactatctccaggtctgagaagctattaaagtggttaggaaaattgtttggggaagagaaaatatgaaaattgtttttggacaaactgtacaggtgaaggtgctttcttatgtgaaaagtgtaatgatttttgtgaattatgcagcctaaatctgaaagcatttttgtggaatgttatattagggtttttgcttttatatacctccttaccttctggattagaggcactgataatttactgacacgatttatttgtttttactgcccgtaaaaagaaccctaggtttttaagacagaagctgccttcaggtacaggtgatgatgaacttcctgtggccagattagtaggagcatagtcttggccattttctttggtgtgtttgtctcttgagtgaattattttagcaggctgctaaaatttgtttgccttcattctttcccagacattttcaacattgtctccagaggtataattttataatgcaggtttgtgattctaaaattctcccatggctactcagccctcgcaatcaccagttctgctttttcttcttgccctatcagcttccaaacgctgacaccattgcatgcactagcaagattttgctgaaaggacccagatatagctctctcttgtgagactatgccggggcctagcaaacacagaagtggatgatcacagtcagctattggatgggtcacacggcccccaatggaggagctagagaaagtacccaaggagctaaagggaactgcaaccctataggtggaacaacaatatgaactaaccagtacccgggagctcttatctttagctgcatatgtatcaaaagatggcctagtcggccatcactgcaaagagaggcccattggacttgcaaactttatatgccccagtacaggggaacgccagggccaaaaggggggagtgggtgggtaggggattggggggggtgggtatgggggacctttgggatagcattgaaaatgtaaacgaggaaaattcctaataaaaaaaataaaataaaataaaataaaaaagaaagaaaatctctagggtacttttcttgtccccaaatcctattcatgctgtctccttgccttaatcataccttctcattctttgtccccaggtcagatgtttctctttcagcaagcatgagctgtactgtactttcctttaacaccatatgaacatctccatactcttgcctggattttaagactgcctagcttcaaaattggtctggaaaataagcatacttctctcagcttcagcttaagagtagaaaaaaggaagtggtagatgtgagctgatattcaagtggcagcattgagattccctcaaatccttggttggttaagacatgtgtatgggcatagtatataatgttagttttccgctaaaacctttggaatttactaaagtacaatcagtaatattgtattatctcaagaacaactttgtgccccttctaaagctccctattatagttccctaagtcctggtaattcagaggtttgtttttacgaatttaactactgcagataatctccctatgtacaattatacaatagtgtctttttgtggcttcactttatttagtgactgaaagtttcacttatgttaaagcatgccacaacctttcatttttaaaatatgctgttggatctctctctctctctctctctctctctctctctctctctgtgtgtgtgtgtgtgtgtgtgtttgtgtgtgtgtgtgtgtgtgtgtgtgtgtgtgtgtgtgaacacgtgccatgttttagaaatccatttacttatcattgaacagttggattcttatgctttgaaagtgaaatgtcctccacagtcacatgtgtttgaggacttgataccctccctgtcttgggaacttttaagagatggagcctaggggtcactgtagtgtaagtgttgaaggatatacctaatgcctcttctggaccacacactttgcatcctgaaccactgagatattgggagacagcctggattcctgtgcccatagattgtgctaactgttgccatgccttgcctgtcatgttatgctatatttactaaggaaggctcaaaaataaatccccacttcctcaagttgcttctatcaagtagtctgttacagtgacaagggaaggaatctttctgcaaccctgttcagtgcttcaggacatagatactcagaaatattgggtcatcaggaaggtctatttttaatttcttgagaactgccatatgtgatggttaattttgattgttaacttgttgaaatttagaatcactatggaaacacacttctgagtgtgtctgtgagggtgattccagaaaggtttaactaagcaggaaagacccattctacatggtaggtagctggggtacctgactgaaggcaagttgagcagcaccattcacaactctttgattcctgttgcaagggtagtattgaccttcaatttccttgccataatacattgcaacctctcagaacagcccaaaataaatacttcttccgttactttgtcaggtatttgaccatggaaatggagaagcataactaatatacagaacgttttcttcctcctccctcttttctctgtgatgctgggaatcaaatccaggtccttgagcatgttggacaagccttttattactgagctatactctccctgccctaacctcttttagagggatctctctatgtagtccagattggccttatacttgtgatccttatgcttctgacttctaaggtctagaattacagaacagtgccaccacacccagcctgtcatactgttttctatagtgttgcactgtctcatcgtcctactgcgactgttgatacactcaatagaaaatgagagaaatgaaagcagaaatgaagggaaaatacacagttttgttagtaggaaggaaaatatcacttagccaatttagctcgtttagatttttcagctaatactgcttttgttcaggactatcacttcagaaagagaaccattttgagttacggttatccatcattgttcactgagaatttctaaaattactaacttgatagtgccttagcaattattagggggtacttgagagttgagttttacatttttctctgagtttatgttagaatgatggtgacatgaagcctttttaagagttttgatgtctttgtgattacaaattcttactcttgaattgaaatatcgtaatctatagtttagatgctaaaatttaacattgtgacttcttacatcttagttctctctctctttctctctctctctctctctctctctctctctctctctctctgtggtgtgtgtgtgtgtgtgtgtgtgtgtgtgtgtgtgtgtgtgtgtgtgttttgctgaggaagtggttgaattccatcaatgtatgcaagatgaagagcaagtaatgcagtaagaaaaggttgggtttttttaatatgaagtgttatccaaatgcttagtcatgatgataaagtgaagagctttgcagcttgcacagtagaacagtgttacaatgatcatactgagtgtttgacgatacggaaggtggcagcagagtgggaaggatttgtcaacgagtttgggggattaagaggattagatagagaacacaaagtaaggatagccctcttccagttctacagagaaaagtagacccatttaaatggtttttggaatgactcaaagcccagatgttttcttactttaatatcacatcaattaaacttatagcctctttgatgactatagaggtatgctttccggtttgcagcatttactaattcacaaagcatgcaaatagacttaattatattgtataacacaaaagagaaactttactactctgccaaatacatatatcaaaaaatgatttttgctgctggttctatccatacctgaattgtcctttagacagatgaagtaatttactaataaatatattgcctctagtctcttttatccagtcctttccttgcagtgctcctgaagttaatctaatcccatctggagtctgggaccattgagccttgggaaaattaatttctctgtgtctacatttcattgttttattctaagataaatattgtacctctctcttaatttcctagtaaattaacaataattttagtgctggtagaatagatatcatacaatacatggtgtgtaacaaggaataagtaaaacagtaaatagtggtagagatagttactgttgtttttgtttctattatttgtgtttgcttctgaagtcgaattctggctacctgtttcaattttatgtcaacttgacacaagttaaaagtcttctgagaggagggagcctcaaccgagaaaatgtctccataagatttggctataggcaaccctgtaatattttctgcattagtgatgttggggaagggcccagcccattatgagtggttccattcctggactatatatatatttttaaaaaagcaggctgagttagccatgaggagcaagtcagtaagcagcactactccatgtcgtctataccagctcctgccttcagattcctgtcttattgcgttcctgtcctgattcccttccaagatggactatgatattttaagtgtaagccaaataaatcctttcctttccaacttgcttttggtcataatgtttcatcagaacaatagaaaaccaaattaagatatgaccttattacactgatcaagaattttgatttttcctttgcttatgacaaaactttcaggtattttcaagtaattatattgtaatagtatataatcccaagtaccccaaccagatctgatgaacctcaggagtgttctctagctggtggttctgggatcttcagtggcggatagttctatgatcaaatgcaaacttatcctagatgcagggatccaggtaactgttgctccctctgtgcttccttacattttgctgcagccatagtaagtaaattttctctttgctcaaatatttaacactataactcctggtgtctcttaggatagtattctggtatcaaatacatatatcttcagtaagctatccatttaataatatgtttaagaattggttgcatgtgagttctaagctatactatatagtcttctgtaggttatatcactagctgccttaggatggcagcttttaattgacccgtccttttgttctctttgcactcctctgaatgacttttccaggcgttacagtgagtaaatagttccaggccttaagttgctcagctggcttctgtaaacagagagactaaggcagattcagtccaatgacagaagcaataagtagtacttgaaattgcaattcttttttcatcacatttgttttctgttgttaataagattaagacattaatgaaattatttagagtattttaagaatatttaggtatctctgatgatctttttagtctacaattcttgctgtttgtagttgtaactaaggatgctgcttttcagaaagattccttataacaaaaaatggaaggtggagaaaaaactactactgtacattttcttttgccttgtatcttctagttgtcaaggaactccacaattaagtagcaagtttgttaacttacaatcaggcatgaaactcaagattacagagcaataaacagtggtttcaggtttgaccccaagtcccttgacctcatagactgatttctttccagtgttgtctgggccagcattgctgttcaaattcaatttctgtgttaacaatcacttccaactcattaaactcagggctactgtgatcatgctgtcaaaggaaaggcccatatacagtcaaaaacggttactaaggtggaatattggccctgcagatagtaagatagaataccctttcaggcatcaagcaggatgtactagaaagtactaggtcaatcctttaagttcattttaaatttgacaatggcatataagcttaattggaataaaattaattcttattaaatggagaagttttcacataggcttttaaaatgtgtacaaatagagaaatagtaacaacaaaaaaatgagtgtctagtttcaggtagcaggttgttagtccagctaattaaatgaggatgcatttaaaaaagtaaatcaatgacaagtagtaaaacaagaatgtttatctttgattttctgtacaatatattaagactcataagccaaaagcaaatgcaagatgctctgtgtcaccagtcgagacttaattttgtttcttgagcaactgtttcctcccacccaccatttggtaatcattcaacttgatgtcacttgcttacatagggaaagtcaatgaaagagatatattgaacagtactaggtaaatggtccatctcttgtctgaagtaaaaaggttgtgtgatgaagtgaaatgcgtaagaacatcagagtgaaacacgtgtaaatgtgccagcctgggacaagacacagtgccaaggccataccccatttaggtcccaactctgcaatattctctgacacccccccaataataccattgagtgattcatcagtggataaaaccattgattatgtcagcacactaaacatataattatgtgaatagattcaacgaaggatcaaaccttcaacacctgtacctagtggaggatattttatattcatatccaaaccatagtactgggttggagattacactaatagttgtaaataatttgctgacaaggtacggatccaggaaagttagaatatattgttatccagatatgtatgaccttcagtgggtgaacttacttagaaatagaaatcttagagagattcaaggagggaagtcatctggaataagctcatcagaatgtttctgtgtatctcaaagcagagatgtaaataattactatttactaatgctcgatagactgtataatgggaaaagatcagtttttactactgctgataatgattagtttagaagtaatctctacaagatttatatgaaacataatttttagtcataaaattttactaggtgataaaaattattaataaattaattgaaaagtgaaccagtactgataattgggaaatttgaatattataaaagctacttattcttggtttattaatttttaggataaattaaatggttagaaaaattactatagtattttttggaaggattgtagtaacaatttagaaatataaataattatgaaaaattaaaggcaaatgtggagaacaaattagtagtatgatataaagctgtagctagtaaaaccattttatgcttgcatataaatagatcaacctaataagttaaaaattgattttgatatatatatatatatatatatatatatatatatatatatatatatatatggagagagagagacagagagacagagagagagacagagagagagagagagagagagagagagagagagagaatgtgtgtgtatggttttctctgggggtgtgtgcaaatgtgtgtacatggctggatgacatgtcaaccttgtttgtcaattcttaggtgccattcaccttgttttctcaaattggggggggggtatgtatcttgcccttgttataggaatgggggtaaaaggtggtgcagtgtatcacagattatcatgtgtctgaccacctccaccaccccacttgccaagaaagcaatgcctatggctcagtaaagggtgctgagattgtctgctttattgcatatgagtaaccacttatatactgaaagcctattgactgtgatgggtagcatattaccttggattagatagtgaggactcatactacctgagtctctatgtagaagaagcacatcaataaaatatatgctacactcaccatgtcttccttaaaaatatatgccatcacaccctgcgttttacatgggttttgttgattgaactcagatcctcacatttgcatggcaggcacttgctctgcttaaatatctatttttgataagattttagaatactttatatatctgtgcaataaatacaatgtgcaaatatcttctcctagtctgtgacttgcaatttcagttctgagcagtctctgaaaaagttcattttgttttattttagcaaagtctagtttaatttgtatgcccttcttttggggttttatttctgttgttatatttaaaagctcttcctataatgtaatgatttgtctaacccaatcaaatttttctgtgttaatgtgttcaaaagaagaaaacgtgaagataaaggacgaactatgtagtcagctcctgtatggaaatacattctattaggatctactaatgtctttgcaaagccctctcccgtgaacacctgaattcctattaaaatttacccttgataatgtcaaaaaaagtgtctttaaaatgaattctaattgtttatttataacatgagggaataaaattgtttttaatatgaaaatattttttaggatttatatttaggtatgtgtctatctgtgtgaggatatgtctctatgggctctgtgaaaacccattaaagaactgtgtattccttggaggtagagttataggcagttgtgtgctacacaatgtgggtgctaggacccatgtttgggtctactggaagatcagcaagccctcttaactgttgagttacttctccagtctacctgattttgaatcattgttgactttgtatcgtaaactctttactgttgtctttgtgaggagtagtagtgtttgtttcccaagctggcctacatttgtggactcaggtggttcccccagagtagctgagacaatgtgcacatgatactatgaccagcataggatcattgatataaaaagagcttggtttctggtattgaattatctcttgatattatgaatagtccctgacttgatgcttttgactttatgatggtgtgaaagcagtatatgtctatagaaattctattttagatttttaatgttgaccttttcctgggtgaacaatatgtgtggtttgacttttttatgatgtgaggcagtggcagtgaatagtaagtagtggtcactctccaatggcctccacagttgccaagctggtgtttgtgaagtttaatatatgttgatataatattttaaaatgtacgtataaactcattgtcagtttaggaacatgcatactttgtaatgtgcttgttctgaatttgaattattaaagttataagttgttatttcctgtaccttaatatattatttgaaagaaacttatttttacataaaaatttaaaaattcccttactgagtaccctccttttgtttattttataataatactgttaaaattattgagacaaagaattaatactaataacaataacattaataatattattataattaatattaataataataataataatattaactaataacaataatagagctattatttgaattttaaaattttccctatcaggctccttatttggtgatagttctagtacaggatctcagattgtattatgtgtctcttcttaggcgcccccgataaggaatagttctatatgagatagtcttttatgacctggatactttcaaataatactgattgctaattttgtccaatatttgagattgagttttgtgtatgcatgtgtgtacacaagtggggtgtgtgtgtgtaaaccagaggctcgtattaagcaccttcctcggtctttatgggcacaggctatgtagttatcctagttatcaaagtaactgccattcactaattttatttccattcttattttcaatcattaccccagataataataaagtttctattgtttttattttcatattggggattgaacccagagtctcctacatgctagctaagtaagtgctcctgttcttgtgctatatccccaggccctgtgattctttttcttaagttgaaaaaggttatctaagctggctttatagatcatttgaagccatggacaaaagattatcggtattatgctttcagactgggtaccttctgtgttatggccagctgttctgaatatatatatacagctttagcatctatttccttgaatggaggctgaaagcttcgcatatttctcctagcttcttgagaggcactttctgtacacattgcgtttactcaaagtgaagcccccaatctgggttcccctgctacattttctagtcttgtaagaacaaactgtaccagccttgcttttgccagagagcgcctggtaaacacagaaaagaattgctagatctatcctgctgactcagctgccaagttctcccacacacttgctgagcccccttctgatgccaagttccacatcttgctgatttctactatcctatcttattaatcagaattttactgtaagcaagcactctcccttcaacctattttttaaaaacatatttagttatttatttagatcattgtggccctgtgacatttgattgttattaaactgctagctctttcaaatctctttttatatgttctgatgtttgaagtaaagacacaaacgagtaaataaataaaatgtagtaaggacagagagagttatttgtaattgtacaaatagtgtaactgtacctaacaataccaaattctagtcttaaaaatgttaaaatgtaagttttgttatatctattttgccacaattagagaaaaaaaactttatatcaaggaactaagaaatcaataagtaagaaaattgtccctaatatccatctagtgacaattacctctttatatactaatcatctttgaataaaatttaaccttgggtatttataaatacaattcaaattaattttgagttaaactcgaattgtattgcataatttattattattctaaaaattaaatcacatggttcatttcccatgatgttctatagggaaaagattatttttttctttttttattagatattttctttatttacatttcaaatgctatcccaaaagttccctgtaaccctcccccactcccgccctgctcccctacccacccactcccatttcttggccctggcgttcccctgtactggggcatataaagtttgcaataccaaggggcctctcttcccagtgatggccaactaggccatcttctgctacatatgcagctagagacatggactctgctgaagggaccctgatatagctgtctcatatgaggctatgccagtgcctggcaaatacagaagttgatgctcacagtcatctataggatggaacacagagccccaatggagaagctagagaaagcatccaaggtgctgaaggggtctgcaaccctataggtggaacaacaaaagattattttatacagccccataaggttgtttcgttgtagttgtcatcatcttcgtcttctccttatccttctgcttctccttctcttcctcttcttcctccttctcctccttcttctttcttcctcttcctcctcctcctcctcttcttccttctctttctctccttccatccatccctccctccctccctttctctctctgtcccttcctctctcatatgtgtgtgggcatctgtgtcattgtgtgtgttgggggtgggtgcagttcagaggacaactttgtggtcagttcactccttccaacttcatatggcttttaggtatcatactcaggtcatcatattgctagcttgtcagtttataaggtgccttttgagaaagtaaaaatgaagtcaaacctagaaagtgtaattaaaacacttcatttattatcttccagtcccacacattttttgagatcagatctcactgtatagctctggctgtcttggaactcacttgagatcagagtggtctcaaacttacagattctctaacctttgcctctaaagtgctgaaattgaaggcataggccacctccaccagcccctttctatatatttcatacaagatcctgtcatgtagtccaggatgaactgaaatgtgtgaagtttctgccttaatctccctagtcctgggatttcaggacatactgaccttgctaagaaagcagtgaattaatgaatccatggagactagttgggtatctataaccagaaaaaccagtaagtacttttaatataattgctgtatgtggtactagggatggaacctatatattagagataagtgcttatcactgaattacatcttcagacctgaagccattttaatatgactggctttgctggaagtatattatttaggccactgggtgtcagctatctattactgtatgacaacaaatcaccacaaaccccagagtcttcaaacataaattagtggtttatttctgtttctggaggagtttgctgggtttggggaggcttattcattattttagtttgcttttcttttgctgtgatagaacactgaccaaaatgaacttaagaaggggggagtttgttttacagctcccaggtcacaatccatcattgagggaagtcaggacaggagttcaagcgggaacctgagagcagaagctggatgagggaccacagaggagtatagcttactggtttgcctatgtttgcttcagtgacttgctcagctacttttcttacatagcccaggaccacttgcctagaagtgattctgcccacaatgggctgggcactcccacatcaattaggacagtctggtggagacattttctcagttgagattctctttttttctgatgactaatttgtgtgaaggcaaaaacaaacaaaaaaccagcatacccacgtagttgcattgttgcatttagtagaaatagagagtctaagatggccttgttcatgtttggtgcccagtcggggatgggtggatagccagatttttaatctgtcaaatttccttagttttttaaaattagatttattcattttactttgtatgtgagacttttgctttagtgtctatatatgtgccctatgcgtgtgactggtgcctgcagaggtcaaaagacgtgatcagatccctgataactgaggtgaagaatgattctgaactaccctgtgggttctgagaattgaacctggctcctctgccagagtaacacgtgctcttaactgttgccctagctctcaagtcctctgtttgtagaatttcttattggatagttctttagatcaggtatctgacctaatttaatctgtcctaaattaatgaagcagaagatgtaagatgctgtgagaccaggtttggaactgtcacctcacttatactacatttataaggccagataggggcttcaaattagactctctcttttgatgaggaaatacagcaacatcacagtgcaaaagaggtttggacacaggaagaattcactgggactcattattataaggatctacaatgaaagaataggaattgatatagtaagttctcagtaaataacgaattgttaggaagaacgggtataagaatgtaggcgagtaatggtacatgtgcttaaaatgtgggtttctgggctcaatacccactccccccaccccccacaaaagaagagataaaaggttagaggtagatggctgaggaaggctcatgttttgcatcaatattttttgagagagcatttttcagaagttcagaaaagattatagaacattaaagaacatgtggtgaagaaagagaaccaagtctatattttagtttgagaaattttatttggaagataagtgcttgatatatggaccaggagattaaggaaaatatgttttaggttcttagagtacatatttaaaggtagaaaaaggtgtaaaaagtgcaagattgaaaagatgtgattggacgtagtgaggatagggcagagtcatgaaagagctgggagaggctgataaagagcacagttggggaactagtagttcatcttgaagcagccggacagtcagaaattacagagaaggcaaggagacaaccagaggaagagaaatagtctgtgtctgtgacactggatataaaattatttgcatttcctaacagtagttttagacttcctaggatttctatagaagttgttttctcaattataaagcaaggttttataatccaaaggcagaatatgtaatcagagataatataatcttttatttacttattttgtaatgatgcatgatgattctcagggcacacacataaacacaaatgcacacacacatacatgggcggggggggggggagcggaggggaaggggagagggagggagaacataagacttaccaaaggccacagaactagccagtgagccctacagtatgactttaagtggttatggctttgtctaataatatttgttaatttttctggtcctggatagttatatgatttatttcttttcagggtattagatttctcactcacaatccctatgtctcaagattgtagtggataacaaaggagaccatttgtgtcatttctaaggttgtctgatacatgtagcagatgctcatgaccagaaatatcattttcaatattggttgtaaaggctagctgttacctttttagaacttgtcatcttgtcccattaattagatgcattgtccttgaactgtgggacagtggcaacgagccagacgtaagacacactgatagcacaaccttagctacgagacagaaaaatctgcaaaagttcactcctttattcagaaatattcacaataaaataagttaaattttactataaaaattggggttgggaagttttgtggctacatctctatttttaaaaggaaattttggaacatatctttacaagtggtggcttttaaactttgacatttccgtgatgcctgttttaactcaagaaactcatcagctttaacattgtttgccagattttcaaatatttatgaccctatcctagcataacataaacatgaaatgtaatttgagtgtcagtactatgttaaaataagtcacattattaaagaaaaatctggtgattgttacttttctttataatgaagactttccaagatttattttttttaaatatacaaaaataaaacatagtcctaataaaaagtatagtttgaaacacagggtacctacaagaaatcaggcccatggtcaaaatataagcttttaggtttacatagtaaaaaaaaaaatggccatcttactaaaagctgtctatagattcaatgcaattcccatcagaattccaacatagttctttacagaccttgaaactaaaaactaaaaactaaaaaaagacaggttgatcaatcgaatagaattgaagactcagaaatgaacctacatacctatgcacacttaatttttgacaaagaagccaaaacaatggaaaaaggaagcatcttcaagaaatggtgctggtctaattggatagctgcatgtagaagaatacaagtagatccatatttactcaaatccaagtgggtcaaagacctcaatataaaaccagatatactaaatctcatagaagagaaagtggagaatagccttgaatcataggtacaggagtcaagttcctgaacaaaacaccaatgactatggcactaagatcagcaattaataaataggacattataaaactgaaaagattctggacaccactaccaatagaacaaaagggcagactacagaaagggaaaagatcttaccaaccctacatccatcagaggactaatatccaaaatacataaagaatttaagaaattagacaccaacaaaacaaataactgaattaaaaactggggaacagatctaaacagagatttctcaacaatgtgatctttaatggccaagaagcacttaaagaaatgttcagtagccgtagtcaacagggaaatgtaatcaaatcaactctaagattctatcttatacctgtcagaatggctaagagcaaaaactcaaaggacagctagctcatggtggcaaggatgtggagcaagggaattgcattcctccattgctgggaggagtgcaaacgtgtactgtggaaatcaatttggaagattctcagaaaaatgagaatagttctatctcaagacaactataccactcttaggcatgtatccaaaagttgtcccactataccacagggacacttgtgcaactnnnnnnnnnnnnnnnnnnnnatgttcatagcagctttatttgtaatagccagaaactgcaaaaaacctagatatgcctcacctgaaaaatggataaagaaaatatggtacattacagaatataatactattcagctattaaaataagaacatcatgaaatttgcaggcaaatgagtagaactagaaaagatagtcctgagtgagattacccagacccagaaaaacgcacattgtatatccacttataagtggatattagccataaagtacagggtaaccatggtataatccacagacccaaagaagctaagtaacaatggtcccaagggatggtgcttgaatctcactcagaaggggaaataaaatagacatcagaggtaaatggagggagagaactgaatgggacagggggtagagaggggaaatgggctttagatgtgtgggtagagagagctggggaaagagaatgaaaattggttgtagggagtgcatctctaaaagatgtcagagacctatgacagcgagactcctaagagtctatggaagtgaccctacctgagattcctagatgtgggggatagggatatggagcctgaagtggccatctcttgtagccagtggaaggaggacaccaacaaaacctttgactgaaaatttgtcctgcctacgagatgtacacagataaagatgaagcagagattgagggaatggccaactaataactagcccaccttgagaacccattccatgtgagagaaccaatgcctggcaatattaatgatactgtgctatgcttgcagacaggagcctagcataattgttttctgagagacttcgtccagcaactggtgtaaacagatgcagagacccatagccaaacatggggtcttatggaagagtcgggaggtcaattgagggagctggagtggtcaaagtcatcacaagaagtcctaactcacttgggttgatgtgggcttacagagactgaatcgctaccaaagagcatgcattggctggacctaggttcccttcacatatgtagcagatgtccaacttagtcttcttgtggatcccctaacaattagaagggagtctgtttcttacttttttgcacgcctttggatccctttcggctacctggctgcttgatatcccagagcggttgatacctagagggggactagccttctctgagaagtggggagagggtctgaaggtgggacttggaggagaagagggagggggattctgatcagaatgtaaaatgaataaataagaaaaaatcgcttgatatacaggcgtggaatgtagtatcctttgattttgtcagtccccttccctccctcctcattgtaagaaaccagagaaacggttattgtaggcttcttggaaaatggtgacattgtatattggacacactgaatacaccccaagttagtatacttaaatgaattttcctactctttgcatgaactgagttagactttaaaaaaagtctcaaaaggaaatgtataaaaagtgagacagaaatcctgtgatctttctctctaaatagtagccattataatcctaaacataagtttttgttagttcaagtatatatcttagtatctatgtttgaatgaaatgcttactttatgaccaccattttattattatcaacttaacattcttttttctcaaaaatttacatagttaataaaccaaggacagcttttcatttttttattcaaatctttgatttaccacttttatagttctttttcttctataaagtgctaacacactcttctacaaagttgcgtgtacctttgaacatcactagtaattctaagatttataacattcaggaaggactttaaaaggaagtatatggagagggcacacattttctaggtcccactaagttgcctaggttggcctcagattcatgatcctcctgccttagcatgtagaacagcttgggttataggtatgtggtaccactagtagctgagcaaagacatagatgatagaagtttgatggagagaaaaaatgcaagtatgtagagggcccccaaaagcttagttacatactcatgaggataatttctcccagaataggtatttacatataaagaagagttatgggacctacaagataccctcttcccctgcaaagccaaggaagtttcatctcttgatatttggtaaaggaacactggaagaaatacgctgttaggtatagattcagtaatactttcacataaaaatgtttccataaattcgagttctcaggaactctgcccttctctgagcttttataatcttattttcaaacacttagagcagtttggcagcagattttaggcttttaattttttcagggttcaaatcactatagtgcaatgctctttagaaaccagacaacaaaaagattacctaggatagcagtctgtctgtgagcatttgcattactctttctagttatgtctcgatagagtttttcccctaaaactggaagactttggaagataatctgctactcactttataaatagtattccatattcagttcttagaaactgaatgggcttttggcatttcatccatactatccatgattagcttctgttacttcatttccatagtatctgccctggtgacttaccattaatggtgtttttaatgtattgctttgtattgctctggtcgtctgtgtttccacttcattaaaagtcagtacttcccctggtgccttgggcaccccaaagttcttcatattacatttatcaactgagattgtggggtttttttcattttcataaaattttccactaaggtgattgcagtgtttctgtattgactcctatctcgttccacatgaatggtgaaaggtctgagaatttccttacaagctaacaaactaccttgatataatgaatgctcacagtgttttgtatttactgtagttgctcatacctcatttaacattgcgtgttttattgaggaccatcactgagatagagcccaaaaatctgagctatagtttaaaagatgcatataacctctcacatttgctctagctttctttccttcattgttttggaaagattatcatgatattgcatcattgcttttccctatcattggatatttttttttttttgctcaaacatttcattcactctattatggtcaggctgacctaataccacaataccaagggtttctaatcaaatctggggtgtatcatttcttattcctgaaatttctgtcttaaatccttctatccacaccactatatcatagccgtgtgtgtatgtgtgtgtgtgtatgtgtgtgtatgagtattgcatgtaacccactgtatataggatattgtagcagtattaactttgttttctagatattgttcagaaatgatctcacccatagagcatatcgaagctgtggcctatgaatttaccatctgaattacatttgtgctgttctgtgcggtatcaccattcttacattcactattatagtactttcgaccccattctgggactatgacacaaatgctatcactccacactgtttacagataaaaaaaaggaaagcaatatcttgcctgaggccataaagttagtaagttcttaggcaggatgttaaatgttagctgactgcttctacagtctctttgctttattgcctcattaaactactcttgtgtgagagttacagggaggaggtatattttctttcagtgttgaagtaaactttagctttttcttgaattttggtctagcagaggtctttccaggataggttgcaaagcttcattctatacaaaaatattaccagataacaaatgtgtgtgtgtgtgtgtgtgtgtgtgtgtgtgtgtgtgtgtgtgtgtttactgtggcttgcatccaggcaggaaaatgttccactaagttacaacccccaagccaaaagtaagaatctcaagttttaggtagagttaaatcctttccttaatcttggaactgaaaactgcttgaacgctccgttaggttttatagttcaccagccaatgcttgaaatattaaaaagaaaacaaattacccagtagtatattcattacatctacagattgaaaggaaatggaagaaatgaactgatatcaaagcttagaaactaagaatatatggaaggttggccaaatgtggattttgtgcagagtcctttgtttttctttgcacagatatactatttttaaattgtatttctttctctaaagtacaaaattaaacacctttataaccttctacgttagactctggatttgctgctatctggtaattttttttgaaaacatcgaataatactgaaattaattttccaaattaaatttttatgactttgccgttttatttagtgccttaactatcaacaaatataatttggttgttttgttttgttttgttttttacccagtttttccctatttgggaatggaagaagctgatctgtagaatatacacataattttttacttctacagttcatttaaaggacaccttttgtactagctttcaaagtcatctgttaatattgtattagactcctaaaaatactttccctttgctaacatgaggagaagtactagcaaaaccctcctaaatgcatgtttgcattcaaaggctaaaactgggggctcctaaatcgttttcatccaaagaactgtttgaaatctacttaagaaaacacttaagtttaaaataacttaatttagaaaagagaattgaattgtgattggtcagggtgaactggtacttccttctctgggcttattgttcactttcctccctttatagtttaattctccatttcttctttgatggaacattgaacttctgattccagctgtgacccagttttatatgaccttgtataacttactggatttagtcacctgagccttaagcctttgccgctcatggtagggttatttattatttaacatgttgccatttccagcatgagctccaagcgcctttagttcagaagcatgcatgagtacactgcaaatacacacacacccactacattggcttagaatacgcaagtagacagtgaagagaactgcagaggaaattgagaatgtcagctttataataattacaaactatacatgtgttatgaactctgctgtatatatttcctaatttcaataaactgcatagtctaaacagccaaaactagagttaatcttttctagccctaaaattttatcacaaatattttttaacaaaaactaaagtttgatgatggctttcttttgttttcagagcatatgtgtaactgttctgaggttggaagtttggatgtaaagcgctgcaaccagaccacagggcagtgtgattgtcatgtgggttatcagggtcttcactgtgacacctgcaaagagggcttttacctgaatcacactgttggtctctgcctgccatgtcactgcagtccacatggagctgttagcatcctctgtaacaggtaagcagcagagtgtggatgggaggtctgttgtaaggagaaactgtgttgggaaacttggaggcattgaaagaagagaatagaaggtggggatgactaaaacttcatatatacatcacagaataaaaaaaggctaccctgtggagaatcagttatttaattaaaagagagaaccactgtgatatagatttatacaatgttttgtatattttaattctgtcactttgtatatttgttttttgctttttgatagtttctctgtttcctgaaataaataatgatgaaggattctgttcattggaacggattccctttaggcatttcaagtggaatatctttatctattaacatatgactggatattaaggaaacatattcttggtttactttattctattatcagaagtctcatatttcatataccctttattgttgttgtttttatttttctttctttttgaaaaatattcattgtatttggggggaggggtgcatgccatggtactcatggggtctgaaagcaacttacaggagtcagatctctgcttctaccatatgggttctgggaattgagcttcagtaattagactttgtgggaagtacctgtaccttctgtactgtacctattttttttaaatctttattggatattttatgtatttacatttcaaatattatcccctttcccagtttcccctctagaaacctcctctcccatcccctctccccctgcttctataaagatgctccccgtcccacccacccactcccacctacccactcccactttcccgccctggcattcccctaccatggagaatcgagccagataatgccatcctctgctacatatgcggttggtgccctgggtccacctgggtccctccatgtgtactctggttggtggtttagtccctgggagctctgggagctctggtttgtcgatattattatatcttcctatggggttgcaaacacgttcagctacttcagtcctttctccaactcctccattggggaccctgttctggcaagcctgtaacattagctgtctcctaacttcttttaaatgagaggaaagtagactttatttggagggagggaagaagagagaggtgggggagggaggnnnnnnnnnnnnnnnnnnnnnnnnnnnaggggaggggaggggagaaaaagaagagagagagatcaaattaagttatcttctatttggaagtgaattaatctcctggtatcataccatattatgaaaataattattctttgattatatatacgggaatgcctagctttttgtggacttcaagccaaactctgaagagatagccttacatagtgacaaggacaagaaatttagagttaatgtaacctgaatacagaaccaagatctggtgccgcttctgaactgcactgtgctgttggcaaatactctcatttcagtgactcagttttttctcaaggttgctgtagaagctaaatgagtggttatatatgttataaatgttatatatgttacaaatgggtatggcacacacaaataaagaagtgaagatgtctttatttcaaagacatattgttgaattgagatttttaaaaaatattttaattttaaaatattttaatttttgaaaattttgtacatgcatacaatatattttatcatatttatctcccacttcttgtggtggaatatttttaaggaacttttatagctccttggttaaaaacatgctttaaactaagtgggtggtgatagcacatgctttgaatcccagcacctgggacacagaggcaggcggacattcagatttgaggccagcttgctctacatagtgaattccaggacagccagggtgatgcagagaaatcctgacatgaaaaacaaaacaaaacaaaaaaaaaacaaattggtaaagtgatttagattttaccaatagatattttagatgttttataaaccatattgtgttattgtacaatattacataatgcacttatattaaaatatagaaaagaaattgagaagtttataacttgaaatgaagcaatgatgaatgtttatgatttttagtaatttcaaagtttttcttaatcttcatagcaactctatatatagagattagtaagtcacaaaaatataaagaattccaaattaggctttccaagtctaagccctggatttaacaccatgccacatatcacctataatgaaacgattaatagtctttattgatattgagactatagtaacttcttttttttttttttttttttgagaaaaggtttcattatgtagccctagctggcttagaactcttaaaacaggctatcctcaaactcatggagttatatctgcctttgctgtctctatatctgccacttctgcctctacttctcaagtgctgggattaaaattgtgtgctactatcactggtggctccatgaagtacttccttaccatgcctcatatacatagccatacaagttatattcactttcttttattgtggtactggtaactgaattcaggatcttgtgcatactagacaggtacttttccagagttatatcctcagcccaacacacctaccattttaaaacaacaggatgctatgaagtagacaatatcatcgccattcttttgttttgttttgttttgttttgttttgtttttttccagacagggtttctctgtatagccctggctgtcctggaactcactttgtagaccaggctggactcgaactcagaaatccgcctgcctctgccccccaagtgctgggattaaaggcgtgcgccaccacacccggcaacatcgctattcttattacattgcaggtttgaacatttatatgagtagtaattagtaagacagaaagatactgctagaatacctgtgttctagaaccaaagtacatattcctgtctactgtgatgatacatcttttctcagaaaatcaagtgctgaaccaagaaagtgagcatggtgttttttagatctgatgtttgactaatacaatcagagtacttgcattgttaaagaatttcttccagttgtcttctgataatcagaccttgaccctggtgagataattcatgctaaatcagagctaatcccagtgtgttgttagtaggtttaggagttaaagatcagccctgttaatagctttcttatgtgatgtttaattgctttcttgttgcattagcaccttggagtaaaagaaaaaggacttttttctcttatcaggcaatatatagtctgtgtaagactaaaggcatagactactaggcaatatcacaaacaagtgtctcaatacatgcctggtttgtaagcagaacattttagctaccaaaggcactgctatgtgtcttttgggttatgatttagggaagtagaaaaataagaccttatgcagggagggagacccagaattctagagaattttctaaaataatgcaagaagatgagagatttcttctcttaaagccagctaaaatattttgtcttggatctccctgttctcattaaaaatgaatagaaatgagttctgtcctgactcacacattgaaggtctatggaacaaacaactgactttaaaaattcattttcccattctctctgtccatatgttttagtgggagttgctccagtgagggtagattttggctctaggagccagatgtgggttgagcaatatctttgtatgcaaacacaaagttctctatgtactgatagaaggtcacgcccttgtgttactattggtgttctagtgtgtttaactggaaaaagttggtcggtaccatctgaactttttatttttttcttttgggtcacattcctagtgttttcctgattcaaattttgatctttcattaattaaagacacaatgttttatccaaaaaagaagtctgctagtgatgtcctgaatgttatcatatatatttcttaagatattgtcatatctaactttaatgctttaataagaagtaacaaaatattcatgccaaattagaatcatgattttgtattttatattatcttagtgaggtaatttctatgataatatagtattcttctcctgaaaatccatttttggtgctttatagtatgtcttagaatatatattactttgctttttcaactattggaagatgttccagatcagaaggcagattataattatgtcataaatgaagggcaaaattaattttcaatagaaaaataacagactcttctaaaacctttatctatatagggcactaaaaatcatttttttgtgtagtgtttaggagcaacagttagtataaaatcgtgctttgtgaatgcagctttcaaagatttaaaaagaaagctatttgattgctagaaacagtaatgtgagaagctttgtcatttcaaccactcatttttcatgtaattcaggcattgtatttgccacccatgtcaaaagatatcctgttctcaagaaactcacaggttagaataatacctatgaaaaccaatgttagagcttataaagtgcacaagttattttaggaaggtcttaggagggaatttatgtttgaaatggaatttcaaaagtgagtagaaatttgtatgagaagaaaggctcactatttctagaaggcaaagtttagtaatggtagtgaggaaggattaaaagagagtaggaaataggactcttgtctgttcattttgtgttgtatctcagagtttggcttaggagaaattcagtaagcatttggtgagtcaacagaatagatgagtgaagaataaacagccagaccaataaggagctactgtgccaccaaattcaccactaatatgcttgactaggaggtgatatcagaaaaattatctgtctggtgaccagaaagagtgtgctcaggcaaaaagaccagtatgaaaactacttaacaatttaatcaagggaagataaggccatatctaaaggacagtaaagggaaccaggttaagggttaaatggttgccttaaacatatgaagtaagtgggagagagatgacaactggatgccttgctggcttggccatagaagtggaagaaaagaaatactccattaaccagatgaaacaatagtggtgaaaattggaggaaagtagtgacgctgttcatttttaatcatatagatattgaaatgactgatatagctgtcttgttgatacattctgacatgttctctaacaaactcaagaaatattttgttatttttaaacgaagatttattttaaagtgtatgtgtgtgttcgtgtgagtacaagtgcttgtggaattcagaagagggtattagatctcctagagttggactaacagagccacataccgtaacatgggtactcagaactgaattcaggtcctctgcaaataactatgtactgaaaatactatagtttatgctgttttatagaaaaaaagtacatcactttataattttattctttataccaattattattcctgcaagtcaccaacctcaagtttaaagtctttttttttaatccttcaagataactttcattggaagtggaatttttaaaaataatcagagaggtatgaaaataaacgtaggtatgtaactcagcctgtatcccttaatcatggtgtgtttgttctaataaggatttatccactgctagatagtttatatcttagaaggtagattaaggtcattatgccaaatggtttatggaaaaagaagttggaataaaaaactgactctcaagtggtcagagatagtctcattcaaaaataggctctgagaatactgagatttttacgggaataaggcatatctaaagtcgtctggaaagtgttatctgtattgtatctaaagattccatttcgtatcaggcacaatttgctctcctagtcatctaattattaactagatagcaactgttagcaaatgaatggaaaaaacccctctttccagctactcttgacctttgtaacaaggagtcacagtgagttggtattgttattgcacaaacatgtcactgtttctaaatcttatcgtagactcctattgtttagctttaagtcactttaggactgaaagtagtattttaatgttttattattagtaatattaaatacttattttgcttctaatagtctggtccatctatatgctaatggtaaaatcaaataccacaaagtatgaagatacactaaaatgagaagctgggagagatcagtattatagctgaaaccagtgaaaaccagaactgaattcaccaatgtagtagcattttgtctgttttaaagaaaagaaaggatttagacataaaaaaaaagtataaaaagcctttttgggagagtaaagaggattaatgactcagaaatgcacacagtatagatgtgaaataaaaaaggagcagggttaagagatgaatctggtaagtccacctggggtcaagtcatagagaacattaaaagccatataatttgacatttactcgctacatatctttttaaagacatatcattttaattatatggtatgtatttatgtagtgtgagcactagagtgcagtgttcatggaggccagagaaagggattggattccctggagttgaagttacaggtgcttgtgagctggccttcattgatgctgggaactgagcatgagtcccctggaagaagaataggtgcttgtaactggtgagccttctcaccaactccttagcaagctatcctcaacaacagaagtaagatcagaactgtattgtagcaatatccaatgtgggtatatatgatagcgagttgttacaggcagagtgagagttaataaggatcaaaatatgggtaacacaacaggaatgagagagaagtgggaaaataaagaataaagaatgaagtgctgtaatatccatgcttctgtgcataatccctaggaattaatgctttgtgttagttcaaacaaatgtgagggtagttcatgttcctaaactaaatttatagaaatgtacaccagttccagcctccttctcagatctnnnnnnnnnnnnnnnnnnnnccccctcctcttcctcctcctcctcctcctcctcccttctcttctttttgcaagcttcaagcgttgaatggctataccccatggggttttaatctccccaagtcttgcttttgagtatcaaacaaagtctccatatctatgttcattttgtgctgccaagtataaatccaagagcccttcaccttttgagagttttaagagcttttattcattgttaaagagaaacccttggtgtacaaaaataagagatgaggggaagtcaaaagcttgtgtagttaacagttttcataaaatttcaaaaaatcatatttctcttaattactctggtcctcatatgcagtagcagaaagtgcagtgccctccttttgaggtcactcattttttaacaactctggggtcagttcccccatgacagtatgtataaagggaatgattctatcagttcactgatgctgatttttcctgatatgtgacagtctggtccctaaacatattggtacctgaccatctgaccctatccttacaagtagcagtgatttttctgttgttgttgttgttgttgttgttattgttgttgttgttgttgttattttgttttaagggacaacgaatttaatctctcagtgccaggttctcataaggatgctctaaacttaacttcctaagttacagatcttaacaatgagcttctttagtttacacgtgatgcaacatccctttgttgcatggcagagtcagtaacattttttagaatcttcagtagcaaacctgaaataatattctttccctaagggtgaggaacctgtcattgacattcaaactgcaaagggttttgttaaaaccatctctcctaatagtggaacaagttgagtcctcattcacgtcaccaagggaaacctaatttaaacaattcagtttaggcagatcaccgtcaaggttattttcaagttctatttaaatggcaaaacaaacatcagtttctcttgcttaagaagaaagaaactaaaagacaaatttctaggtaaatatctttctcatagacaattttattatacttttaaaggctaacgacttataaacttatagtatatttaatctgtatctgacttctttttaagatgagagaatactacataacttggaaaatactacattctgctattatacatgccattcaacccttctaaaatacttagaaccagaagattgttttacatgatagatatttctataaccattactatttgagcaaccataattctgaaatacaaaatctggtacagagtttccaaacaaagctattcaaaagtttcaagtttataattgacaggaaggaccttgaagttacaaaattgaagagacctgaaacagaaggatataattgaaaagtttacagaaatttaagtgaagtatgtagttcacagcagtgatattattcagggtgctttggaggaacagaacttacagaatgtatacatttacaagggatttattagagtagtttactgactactctatgaatttaaataatttaaattaaaataaatttactccaacaatggccatctactgatggaagttccaataattcagtagtgtttccaatgcatgaggccagatatctcagctggtctttagtattcactataatcctaagcagtgtgctgacttgttttgatcaacttagcccaagccagaatcactggaaaagagggaacctcaactgagaaaacacatccataaagttaagccgtaggcaagcctatggggcattttcttaattagtgtttgatgggggaggctctgtcctttgtgggtgggaccactcctgggcaggtagttctgggttctgtaagaaggaaggatgagaagaaggtcatgtggaataagccagtaagcagcaccgcttcatggcttctgcattagctcctgctctatttgagttcctgtcctgactttcttcagtgactaatagtgatatggagccaaacaacccttttcttccccaacttgctttagttatggtgttataccatagcagtaataaccttaactacagcaaatagacgctaaagccagtgcaggaacggagttgctagcagaaacaagcgcaagcaggcaaagagaaagcttccttccactatgacctttacataagatgccaccataaaggtgtgactcacattaaaggtgtatcctctctcctgacaagatccagattgtattagtcagggttctctagagtcacagaacttatggatagtctctagataataaaggaatttattgatgacttacagtcggcagctcaattcccaacaatcgttcagtcacagctgtgaatggaagtccaaggatctagcagttactcagtctcacgcagcaagcaggcgaaggagcaggagcaagagcaagagctagactcccttcttccaatgtccttatattgtctccagcaaaaggtgtagcccagattaaaggtgtgttccaccacacctttaatcccagatgaaaggcatagcccagattaaaggtgtgttccttaactcggagattcaatcttctggaatccatagccactatggctcaagatcttcaaaccaagatccagataaggatctccaagcctccagataagggtcactggtgagccttccaattccggattgtagttcattccaaatattgtcaagttgacaaccaggaatagccactacacagataaaagtgaatcttcctacttcaaatggtttagttaagaaaaaatccctcataggtgtatccagatgcctgggttttagttaattcttgatgtacacaggttgacaaacaagaatagctatcacagcaatatatattaacttctcagttttttaaatgttctgtgcctgtataagaagtaaaacattaggtgaagttggatgaaagccacatgagagctttctatactttaaagactcttccttaaatattttatgattaaaagtcaataaaatcattattgggagtggccaaaaaaggtagtatgaatagtattgctgtcttgcgataagagttggtcctagtgatagttcgtaggttaaagagaaacgtgagcacttgcatgcatgtgcatgcaaacataaacactttgcatggacacttgggtgcatagacacttgcaggtttagatatatgatgttgtggtgagaagctgacagcctgatttcatgtccttcctgagattttaaaagacgactttctaaaactatgctaatagaaatagtttgaaatagaaggacttttgttgctacagagaaagctttgtcttcccctgtgtctgaaagcagcatgactttttccatctctgaatttttttccatcacacatagaaaaaaaaaaaaaatgtgtcctaccaggcagaaatacttggctgcagagctttttgttctacccgaatgtaatttccactccagatgcctaaatttgccaagcagaaggatttggatatgacatttcttcagatttcctaagagaaaagcttaagtccatcagcagtattatactgtggccttcaacgtgtatagttgggtcaaaaattaaaagtttttcagtagttctctgatatgatacaatgcactttgacaattatttattttgttacattcttactcgtatataaaaacaaaagttataaattacatgtatatattgttctattcacattgaacatatatgtttgtcctcaaatatttatcatatctttgtggtaaaaaaattcaaaaaccttctttagagcacatacttgataactgtagtcaccttacagtgcagggcccaccagaaattcttacttctagttcccacccacccattcctccatcctcctcatcttcttgaccttctactcttccagaactctgggaaactaccattctatgagtttcccagatcaacttttactctacatatgagtgagatcatgcagtattgtctttctattatgagttctattatgcatactttgtccattctttggctgatggacagttagggtttttggattttttgactcttgtgaatggtgtcacaataaacaagcgaatgcagatgcctcttcagcacgttggtttcatttcctttagttataaaccccatagtggggttgctggattgtatagttgctttataagaaatattctgagaaacttctgcactcttttttcatagctgtattaggatacattgccatcaatagtgcagtgcttcacttttccattgggtttttaaagtttccacttatcatggtaaattcagtaacatttgtaggaatgttaatttatctccatagtagtttacagttaatagtatactcctaatttgatttaatagcaattccaagaaataggtgtgattatacagcaaattacagataataaataacaattgaaaggttatataaacccaagcatgggtgtttattaactactagaattaaaagaatcaatctgatagcttctaacagtgcatgttcttttactactctaaactcttatgaagtttagctagctatggtggcacacaggttgctgatgtaggaagagaccacaagttctagggtagcctgggctaaatagcaagccccagtctcaaggaagaacaacaaaaatgtaagtaacaaaaacctaaaaaacaaaaaaaaaacaaaaaacaaaacaaaactctaaagacgttcatgatacttaatgctgggttagcatgtgtctttgttctctagaccaatagttctcaatgaagagaaaaacacaagagatgtgttgatgagtaaatatacttctcagtagagatgtttcataatgttgaagagattcacaaagataacagggttaaattttattataattactacacagaaatattatatatggcagtgtgggtatatcatgtaagtgtttggttgggtgtgggtgagaatgattcattggtgtaggggttggtcattggagagataaatttagaaatcaattttataccacaatgaaaatgagtatttcaaagatggcaaaatgaagtagtgagagcatattatgagaatcccttgaaaggaaaagactagaagtagatataattctttccatgaaagaatttagaggatatcatgagttaatgaagaaattacatgaatgttggaatcaaatgaagtttgcatatccagctggtactacataccaaactgtgcactggaaatacaaggaagaaagcacagagaactgcttgacatcacaaaagtgacttcatagaggagggaaggaagtgaacaaggtaacaatcaagaaaataaaataggtatttatggaaagtgctatgacaaattagaatttttagtggagtgaggtaagtccctatggagaatatagcatttgaataaggaacagactaaatttgggatatgtcatgtggatctcttgtggaagagtattgccagtgcctttgatgcttaggtatatctgagcagtatagtatcattgtggctacagtggtggaaaattagaagcaggcattaggaaagtggggtgttcagaaagtatatttcagatattttcagagtgcagttatactttcaaaatcctataaaaagcagtggtgagaaatatgataacagtatggccctggctcagagacaggtatatagataaaacagtctgagccctaaagcagaagtacacaaagaaaccaacatgtgactgagcaggtcctcaggtatggaggcaaaggggtttacttctcagtggatccttctagacctttggttagctgatactatgtggaagagagtgtagatagaccagtggtttttaacatacacaaaagtaagtgtcaggtggattaaagacataaatgtgaaagcataaaggtgtaggaaagcatcttaatgaccttgcaggacagagagattgctttaactgtaatataaaaatagtaacaacacatttgtttttatactatgtcagaaactattctgtttatatgtctattcaatatgtttactaagttaacctttatggcattcatatgagatatcgctccatcttataggtaagaaaaggggctaagtgatttgcccagagtttagaaaggagggtaaataatttatacattgctagagagatggctcagcagttaagatcacttgttatttgttttagtctttgttccactgtgaagtgacaccatgaccttggcaactcttataaaggaaaacctttaattggatcttgcatacagtttcaaaggtttaagatcattatctcatggtaggaagcattgcagtactcataaaaacatggtgctggggaagtagatgagagttctacatcaggatccaccaagagtaggaagagagagagcctctgggctggacttggccttttgaaacctcaaagcccacccacagtgacacacttgctccaaccaagccctatctcttaatcttttcaaatagtgctactccctagtgaccaggcattcaaatatatgatcctatagggaccattttcattgaaaccaccacacagtccttccagaggacttgaatttaggtccccataccaatgattgagctgcatataatcgcagccccaggggatcccacaccatcttctgacttttgtcagaagtcagtgatttttgtgggtacccatgtgcatgtatacacatgaattaaaaataaaaatcttcaatatttttaggtttattcaatatatatatatgtatatatatatatatatatatatatatatatatatatatatgaatatttgcttgtgtgtatgtatgtataccatatgtgtgtgtagaatctgtagagttcagaagacggtgttggatctcctggaactggagtaaaagcatgtttatgaaccagtggatgctgaaaacttaatccagctcccctgtaagagcagcaagggggttggggatttagctcagtggtagagcgcttgcctagcaagcccaaggccctgggttcggtcctcagctccggaaaaaaaaaaaaaagagcagcaagaagtgcttcttgatgactgttaaaccatctctccagcctcataaaaaaaatctttcaaatatagtttacatggagttatggctggtgagaaaatgaggatttgaacattctaattccagagtttttgttatttttatgtttatttttcattgatacataaaatataaaaattgcacattaatgtaatacatgcaatacactagtccatgttcactttgatttttgtttaaatctggttaaatatatctgtctcctcctcaatatttatccatttctttatggtaaatttttcaaaattctttcagtttttattaactaattttttatgtgtatgggtgttttccctggagagagagagatgcaccacttgcattcagtgttcttcaggacaaaataagtgggagcatctgatcccctgggactggacttacaggaggcttgggacccaccatgcaagtgctgagaataaaactttgatccttcttagaagggggaacaaaatacccatgaaagaagttacaaagtgtggagcagagactgaaggaataaccatccagagactgccccacctggggatctgtgctatatacagtcaccaaacccagaccctattgtggatgcctacaagttcttgctgacaggagcctgatgcagctgtctcctgagaggctctaccagtgcctgacaaatacagaagttgatgctcacagacaaccattggactgagcacaggatccccaatgaaggagcaagagaaagaacccaaggatctgaaggggtttgtagccccataggaagaacaacaatatgaactaaccagtacccccagagctcccagggattaaaccaccaaccaaagaatacacatggagggactcatgactccagctgcatatgtagcagaggatggccaagtcggtcatcaatgggaggagaagcccttggtcctatgaaggttgtatgccccagtgtggggaaatgccagggccaggaagtgggagtgggtgggttggtgagcgggggggggggggtgaggaggggatagggggttttcggaggggaaaccaggaaaggtgataacatttgaaatgtaaataaagaaaatatctaatataaaaaaagaacttggaatcccttgaagagcagccagtgcttgtaactcctaagccatttcaccagccccattagttattttaaaaatgcatgaagcatttttgttgtagtgtttatgttcgtaattttactaaacaaatcttcaaaatattaaaatgaaaattttgaactatttgactattataagtagagatttctgtttatgaaaagatcttataaaaaggtaaagaaaagtcacatactgggaaaggacaattacatatttgaacatggcaggactgctttcccagaaacatttcaagagtttctagaaataaatgtgaaaaatacttgggagaccctttacagaagagcaaagtcacatgacctgcaattatgaaggtgtactacatcactttagtaatcacaagaattccaagcattggtaaagctcagagcaccttcctccatcgcaaaccatgcactccctggtgaagctggttgcctaggaatttagcccttggtacattccttagggaaaattatactcaggagcacaagagatatgaggttcacagaatgcagggcacaacagttaaaaggttgaaagcaatccaagcatggtagcacacctttcattctatcacttgggaggcagaggcagagggatctctgtgaattcagggccagcctagtttgcatagtaagttcaaggtcaattgcttctacataataagaccctgtctcaaaaaaataaagaaatcactgtccaaataatggagtaattgaatgggctgagaattcttagaagcctgtttcttctgttgaagaaaaaaaaggggatgggggtggggaagggaatgagaaataactttcccatctgaattaagccaagctctgagttacagctctgggaatatggtacttttatgtgttttgcctctaatttgcttttgacttttcaaataaggttttaaatttgataatggtaagatcagttatcaaaaatatttttgtacttaggcaatacactttattattaagaatttctgtctgaatttgacttttttctactgtattgtgtaccatgtgtcctcaaaaatacaaggaatgtttggcataatagcccagtgttttcaacaataaagccatcctttttttcctcaagaaaaaggagctttgctcattgtataatggcctttccatgactagaagatagggaacagacagtccttagcgaaaatgtccaatttttgagtatttttggtaataagaaaggaagcagtatttttcatcacgtttaaaaaaccatagctcaaacataaaatgaagaattgtcagtaacttttcattttatgttcctatgtaaaaacttttttggtggctaaacttccttactacctattaaacattatttaatcatttgaaagagcttaaaatcaacagggttttttcttcagactctattttaattagcaatttcagtatcttgcaaaactattctcccaatttaaagcaaagaagaagaagaagaagaagaagaagaagaagaagaagaagaagaagaagaagaagaagaagaagaagaagaagaaaattgatagacttagttaatggaattttgtttgattgtttgtttgtttcttgttctctatgtctaagtgccaacatgtaacatatctgagaaagaaaaataagtaaggctctttagtgaccaaaaacatgtatttattttgtgcatgtgtgtatgcatgtgtttaaggctgcccatgaaggccgagagggcgctgaatcccctgaaaatggtgttacaggcatttgtaaactgcctgatatagatgctgggaaacaaactctgttcccctacaagaacagcaagtgctcttaaccactgaaaggtccctccagatcctactgaccaaaaatatatcaattaatatatagttagttaaagttaatgacagtatatcttaatgtatacctgaacaggtcatttaaatcctgcaaatcttaagaatcatatagacaaatgttttaatgacaagaaaagtgccaagatatttgatactttaaaaaaataaatgaatcatagctggttgaaacaagtagtctagctggctttgatcttgcataatgtagaactttccagagttttaccttctcacttgtaaaattctctttccagaaactgtatcatgtattcatatgttctttgcctagctacctattgctacaaactagggaaaaaattaagtggttaccctttaatttcatgctatttcttttttattggatattttctttatttacgtttcatgccagttcttaaaagagcatcttaaaaatagaatctagaaagtaaataattctgagacttccctgtatttaaatactgtgcattccaccctatcctagtgagtcctagggggaaagcatgatctaagaatatcattactatcgccacagttgctatcatgtttgagttgaagtttttgcttaggctgtgtatacaatgtatagttttcacaataaccctacaaaagttgtagttatcttcattgcataaagaatagctagggtattgggagagtatatgcgttgtgccaagaactcaccagcaaagctcgatgaaaaccaaggtgtggctccttgggctgtttttccataaagtctgatatcttctttcttgtcttccacttctcccagttaacggatacgattataaaataatggaaattttgaatgttctctatccacacatccgaagcagagcagaatctttaaaaggaaaaagattggatagtacttttttgcatagatatgtgtcatatcttgagatgacagacttttaaggatttttaaaatgttttaaattaaattcatgttggaagacatttgctttaaagaaatacactgttttggctagagattaaccacagggactcgcacatgtttgcatgctctccagattgagctatgacaccagcttgaagaataactttctgtaacacttttactgactttgttttttgaattgatcattcatgtataatgtggattctgattattaacccttcccaaagaaatattttttaagtattaaagccttacaatgtttattgcaccaatgattgggtaaactgtgtaaacattggcactatgagaaaatctcaaaacccatttggatagtttaagaaatgtggggtctatgcatagatttcgcacatatagcaaactgattctctgtagagtgttcaaactttgctagaaattcaagtctctaggaaatgacactggaggaacaaattctactttaaatgtcttgctagcatatcttacagatttctgatttctattcatactgcagtactgtgttcttcctctacagaggagaaactgtgaatcttcagttatttcctttcgaatctgtgaataagcacagtcttttgcagcctcctccctcacatttatatcattgacctttgcatcagaaagcagcagtctgtaacagggagaccatgaaagagagtgttgtacagctttattctataaaagaagtcacacaagcaaagctttatgtttggtgagtgatttaattcttatacattctgaaattggctgtggaccattagaaacatgatgaaaaagcacatttagtgcaatatcacaagcaaactctactccattagggttttttgtttgtttgtttgtttccttttgttttaagtgaaaagaaagcactttctttcctgttatttaaagaaaatctacctaggaaaagtgaattgtggtatctagattcaatcactggcttcatcgagattcctggaattactctggttgattttaaaataagtaactaagggttatattctccaggggaaaagatgccagctgacatcagtgttttgagtgcccagaacagaattctaaagggaaaacatagccagcaacaactcaggaaacatggctgtatcatagctacagggtgtttgtgatttagtgtcccatggtagacgaggcagatcctcagacctcagattcttgatccatttgaatactaagtaaagacttagaggaatgaagaacaagcatgttttcatggatgactgaaatgcttgaaacttggctaataaagtgcagttaaaaatctgcgtaagagtgactttctttgtacttttctcatatgtagaataattatgaccccttcttactgaatcacaatgccttgctttgtttcagacatgatgaatgttcatctttgccagatcatgtagtggctttggggtatgcttgtgtaagactagatatctatcagaatatcttttctgttttgcaaagttacttaagaggcatgcttggtaaatgtctattgaattttttaaaagagtagagctcaccctctatatggacagtacaaaatttaaactttaatctaacttgagtatctaagtacttgatgatgtattctcggagaaccttgtaccttgttaccttatgatagttatcagattatcagattgttcagcttctcttggggaacatttgacttttactggcagtgaaaaagagacattatttattctagatcaggtagaaaagaatcaattgtcagaacctgtaggatggtgagctatgagaaataaacctaactcactgactatagacaatagctcttccttcccaatagcaaattagagattgtgaattctactagaagaattatccagaggattaatgacaatattacttattaacatagttctttaacacagaggttcattgcttattgttattattttattattattattattattattgctatcttgttgctgcctctaggatatctccattttaagtcctttttctgtaaatacaattatttgccaggaaattacatggctgaatagtctatgtagctttgaatagaaatatagttcaatacatgatttttatttaagatacaatatttgagtggtggtaagtatataatattaacacaagactgtctttctttcttttctagattaaatttatttgagtaaagctttaaaaactttccatgtaaaactgagtagatttatttttctacttttctactcctttttgacaattcttcagataaccaagaggaaaagaaaaagaaagctgtctcagctattcttcctgttgttgtgataaaatactcagcaaaggcagcttattgtcaataggatttattttggcatacagctccaagttacaacccatcacagcagggatgtcctgataccagagacctggtcttattgcctagccagccaggaatcagaggaaaatgaatgctcatgcatggctgcccctttcctttttctgcattccagaacacaagccacttttcagatggatcttttcccctcaaataacctattctagataatctctcatgggagtgcctcaaattttgccttctagatgattccagatcctgttaggttgacagtcagcattaaccatcacagaagcaaacttcaactctgaaatattttcgtaggggtagaacataaaactttttggttgtagtagtggtatagtaaactgagaagcataactcattaaaaaatatcttggatttgtaaactacaagtagagtaggttttcaaactgcaactagagtatacatggttagaagttctattacttctacaaaattcatttcagagtcccagtatctccaaatttagaactttcattttttattatagtaatagaaagtagggatgacagggaattgcattaagtgatatgttaagggccatttaagtattaatagttttaacttggcctcctgtcctgaatcagtgctcaaaacaaaacaaaaaaaattaaacaattttaaaagaaaatatcacaaaagttttatattttaatgattgaggcattattattaatattattattattattgttattgccatttaagaaatgaatataaataaaaattgataggaactaaataaatttttaagtctttatttactttaacttttggggtagttaacagcctaaaatttttatggaaattaatgcaggagttagatggtttggtacttaagagtgattattgctcttacagaggactagagctcagtttctagtactccagactggcagctcacaattgcctgtaactttagctccagggtatccaataccctcttctgggcttctggtcagtacccacaaacatgttcacagacaaacacacagacacataaataaaaataacctcttcagaattttaatggtgaaattcactaggcatccccatttctagtcatacttacttaaattgtgtactccaccttacatcccagaactatgatttaaatnnnnnnnnnnnnnnnnnnnntacatggttagaatctcagaaaattaaattttgactatatcttgggcaagttatttaatatgtttctgtatccataaacttgggttaaccacctagtagtttgctgtaaaattaaatacatttgtgcttctctacaaatcatcagaagcagtctggaagtaatagctattagaatgatttcataacaatgtttttatgaatggcttatgtgaatagttgggctttaaaacaacaagtgccatataattaggcagtttcagtgacaaaacccaaatctctataactaaggtaagacgtcacggaaggtatcccaaatgctaatgagattacggaggcacttctcttctccttttacttgttttccaaattttctttattgagcacatttttcttaaatggaagtgcaagagagtcaactattttttaactgcaaactttgttttcgggtagcagacttatgttaagaactcaaggcactcttgtgtcttggtcgtctcccatgggagtgagactcgagcagcctgattcactgactgccttgactgctgagctgctgctctgcttcaggatctcacactctcccggcttctgtcctgtgtggctgcattgccttttctgtcagttgtgctccatctccctagatcagcgctatactggtgcctcctctgcactcagagagagcttagcacgtttgtcccctccacttgagtgatctcacccaggccccagatttagttgaaatgccactgatataaatgcgtatttcctgccaggtgtgcatttctcccttgatctccatgggcaaacattcaactggctgcttcatttgaatgatttgattaacattaaaatcccaacacccaaaactcttattttccactaatgccagctttttcccttgaaccaaccactgatagtgcatccttgcccaagccattattacctctctgagctagttggccttttcttctctgatctttgtgcctctgtctattgtctcctccctaggtttctatcccaccacaatccagtctccatataataatttttaatattataaaaattatgacagtcccctgctaaaacccttcagtatcctactgttattcctgggagttgaattaaagatgtatttctatggcctaaaaaataataaaacataaaatcaaaatagattnnnnnnnnnnnnnnnnnnnncagatcctgttaggttgacagtcagcattaaccatcacagaagcaaacttcaactctgaaatattttcgtaggggtagaacataaaactttttggttgtagtagtggtatagtaaactgagaagcataactcattaaaaaatatcttggatttgtaaactacaagtagagtagatttttaaactgcaactagagtatacatggttagaagttctattacttctacaaaattcatttcagagtcccagtatctccaaatttagaactttcattttttattatagtaatagaaagtggggatgacagggaattgcattaagtgatatgttaagggccatttaagtattaatagttttaacttggcctcctgtcctgaatcagttcctttagggagtcactgttagcaactaaatctctaagaaaattatttttaaatgcagcttttggtttaaccatctcctatgtagtgtgactgctgccaagatttcataaagtctaaacttctgagctctacaatgaacatgtaaagaaacatttaaaatatgtaaagaaaggcattttcctctgagccttgtggtgcacaactgtacgtacttagagcagtcagacggctgagagttaaggatcagcctagactggatgacattctgaatgcccatctttaaaaaacaaaacaaaacaaaacaaagacagcatccctattgaggacaagtgtaggcaaagagaaaatttggtttttttccccctgaaaataccctggcaattagtgtttttaatcttttcctcttccctgtgcctaatgccaaaacttagtctgtatatttattgaaaattcatgggggtgttaatattaagtatgtacaacaaaccaaacctttactttcttgacatttttgaggttgtcacgttggtaacatatcatccctgaattaagaacccactcatcaaggtgtacaacattagaacagtctgttccaaaacacagtctctggacttgtgctaggtcttgtcaataggaaaccacatgataggcctttgtctcaggactttgataatggactgggggaagaagctttacatggtgaaagagtacagaataaattacctttgggattggataatgcaagtagatctctgagtttgaagacagccaggactatatagagaaagcctgtctcaaaacaaaacaaaaattacatttggtattaaaatgtaaatgtgagaagacacaagatctctgtggaccagctaaagaaaagtcttattggaagaagccctgaaagcaggaaaaattttagaggtaaagaggaacatggactattctaggaaagtgtacagaagaaataactctaccaagagttacttgaggaaaatgtgagagaagtagatggcatattggacataatggatgactgtaagagcatggggtagacaaaatgaattgaaagttacccagagaaacgaccgtgagtggactaaatgctgtgagaattacacctgacgcagcccttttgaactgttgtgctttgcgccatgtgttatggtcactttgatgacttctgtttcattgaatagagtctaccaggctgtggttttacttagacatacctagaatagggtattgggtcccctagaattggaattatgggttgtgagcctcagtgcaggtgctggaaattgagcttgggtccactgtaagatcaaaagtactgttaattactgagccaactctctaacacattactgtgtatatttctgcacctagaaacagactagctctggtcttcctaaagcccatgtcttcatttctccacgaaccactgaagtctttgttcaacccacttcctatttcttgccataggagtacaacaagacccaactgatgttcccaacaacttgtaatagtcagatgttgaaagcaacctaaattctgtcaggggaattaagtaagagattgtgcatttgagtaatgccattatatgctgctatgaaatggttctttaaggggtgtgatgtagtgcaatggtaaagtgtttgcctggcatatatcatccctttggtttgaatcctcaaaactgcaaaagaaacctgtatgctgttatgggccttctctgctagatgttcatatagatgacaaccgcaggacatcttccttttgtcccttcagttcactgttaaccctgccctgcctgtgtttggtgggaggctgtcttacgtgggtcacagcaaggaattttctactgtgtgacagaagactgttttgtataggtcacagcaatgaatgttcttgccctttgagttctgttttgattcattggatgggagtccctaactaaaacaaaacaaacaaacaaacaaacaaacaaacaaaaacctgggttcggtagcacaatcctttaagtccagaatttagaagacagaggtaggtggatctctgtgtgtttcagactggccaggtctacatagtgaattctaggacaggactacaccagagcggtggttcccaaccttcctgatgctggggccctttaatatagtttctcatgttgtgctgaccccacccataaaattatcttcactgctgttcttaactgaaattttgctactattatgaatcataatataaatatctgatatgtggcaccctgaaagtgttgttcaacccacaaagtggttgtgacccacagcttgagaaccactgacataggaattctcgctcaaaacaaaaaaaaaaaattaaacaattttaaaagaaaataacacaaaagttttatattttaatgattgaggcattgttattattattattgttgttattgccatttaagaaatgaatataaataaaaattgataggaactaaataaatttttaagtctttatttactttaacttttggggtagttaacagcctaaaatttttatggaaattaatgcaggagttagagagatggtttggtacttaagagtgattattgctcttacagaggactagagctcagttcctagtactccagactggcagctcacaattgcctgtaactttagctccaggatatccaaaatcctctaatgcctttatttttttttaatttttattggatattttctttatttacatttcaaatattatcccctttcccagtttccctctctcccagaaacatcctatcacatcctctctccctctgcttctatgagggtgtttctccacccacctacccactcctacctccctgcccttgattctcctacactggggcatctattgagccttcataggaccaaggacctctcctcccattgatacataacaaggccatcctctgctacatatgcagctgagccatatgtactcctttgttgatggcttagtccctggagttctggggggtctggttggttgatattgttgtttttcctatggagttgcaaatcccttcaactccttcagtctcttctctaattcctctattagggactgtattagtcagggttctctagagtcacagaacttacggatagtctctatatagtaaaggaatttattgatgacttacagtcggcagcccaattcccaacaatggttcagtcgcagctgtgaatggaagtccaaggatctagcagttactcagtctcacgcagcaagcaggcgaagaagcaggagcaagagctagactcccttcttccaatgtccttatattgtctccagcagaaggtgtatccaatggctggctgctaacatctgcttctgtatttgtaaggctctggcaaggtctctcaggagacagccatattcaagctcctttcagcatgtacttcttggcatccatatagtatatggatttgataactgtatatgggatgaatccccaggtggaacagtttctgggtggcctttcctttagtctctactctacactttatctccatatttgctcctgtgagtgttttgttctccttctaagaaggaccaaagtatccacactttggtcttccttcttcttgagtttaatgtgttttgccaattgtatcttggctatgctgagtttctgggctaatatccacttatcagtgagtgcataccatgtgttttattttgcagttgggttacctcactcaggatgatattttctagttctatccatttgcctaagaatttcatggatttttaatagctgagtatattccattgtgtaaaagtaccacattttctgtatccattcctctgctgaaggacatctggtttctttcaggctcctggctattataaataaggctgctatgagcatagtggggcaacctaaaattttcatagaaattaatgcaggagttagatggtttggtacttaagagtgattattgctcttacagaggactagagctcagtttctagtactccagactaacagctcacaattgcctgtaactttagctccagggtatccaataccctcttctggcttctgtcagtacccacaaacatgttcacagacaaacacacagacacataaataaaaataacctcttcagaatttaatgtgaaattcactaggcatccccattctagtcatacttacttaattgtgtactccaccttacatcccagaactatgatttaaatactttttagactcaaaatagagaataatatcaagtagctagtctagaaattggtgtgaaatgattcatctatcaagttcttattcttcatatttgtgagacaggagctaggtaaagtctgattcttttctccaatttgaaaggatatctgcagagctatgggataatcctagaatgagaaatagtgatatgtgttctaaattctagtggttcagtaaagaaagggtttacactatgaacatctactnnnnnnnnnnnnnnnnnnnnctcagtttctagtactccagactaacagctcacaattgcctgtaactttagctccagggtatccaataccctcttctggcttctgtcagtacccacaaacatgttcacagacaaacacacagacacataaataaaaataacctcttcagaatttaatgtgaaattcactaggcatccccattctagtcatacttacttaattgtgtactccaccttacatcccagaactatgatttaaatactttttagactcaaaatagagaataatatcaagtagctagtctagaaattggtgtgaaatgattcatctatcaagttcttattcttcatatttgtgagacaggagctaggtaaagtctgattcttttctccaatttgaaaggatatctgcagagctatgggataatcctagaatgagaaatagtgatatgtgttctaaattctagtgttcagtaaagaaaggttttacactatgaacatctactctccatgagtcctttgtcatgtattttaaacattccaagcacagagaatagaattgtcataaattgttattaatactattagctaaaatataaccataaatttctctagtttaagtggctggggcaatgggtttatgaatttgaggacagcctaagctacatggtaagttccagggcagactatgctaggaagcaagtctaggactctagaaaacaaaaccctacaataataataatccctcttacgtgttttaataatgtattattgttgatttatgagcactggtggtttgactgcatatatctgtttgagggtgtcggatcccccagaataggagttacagagagttgtgagctgcagtgtggatgctgggaactgaacatgggccctctggaaagaacagccaatactcttaaccactaagccatctctcaagtccccttttattcttggaagtagactctagtagaaattcttggctgtgttgagataatttatggagcattaagctacagttttcaaaatcacttacttttattcactgtctttgcttttatttgcagttctgggaattgccaatgcaaagtgggtgtcaccggctccatgtgtgacaaatgccaagatggacattatggctttggtaagacaggctgcttgccttgccagtgcaacaaccggtctgatagttgtgatgttcacacaggtatgtatttttttaatagtatcatgaaattattctttattccttaaatcttgaagccttaatgcattgattcttttcaaatagtttataaggccttgaaattttaagtagatataataaggcatatggcaagtcagacttttataacaacttaaaatatttcatgaatttcaaaaatcatatagattgaagattggagaacaacacaaagtgttgactttgacttcacagtgacagacattgaaaaataagttagagctcttccaagcaagccacaatcacttgggaattcctgtgtgaaagaactgagactccatagcacttagaaagagagaggcagatacaagattgctgagtgaaatttactgtggggttacttacacaactaaagtcaagagtggcagctactctggccaatcctcacaacttgaatcagcaaataaagaattgtggatttaaaggtcaaaggttactttcattaaatctagaatgtagttaatttatctcaaactaacatcaaagatgtctcgcatgttcctggtgccagtagagaagttctagtcataaagttccattaccctaccactctttttcttgtaatctgcagtgtgcaggaaggctatataaggaaaggtataggattgcttagacatagtcataaaagttatggcccaagatgtcttcagctaagttaggctgcatgtatacaccacatgatttctttccagtagagatttgctgattctgagcacagggtatggagtaagggttggccaaaggaaaggttttatacttgaaggagagcttttgacagccatctggagcctgggtggtaggtggaaactagaggagccccaaacacaaggccagttctcccaaccctgactaagacgtctgggccagaagatgttttatgctgaggagacaaaaatccttttaaagagaagagggcttgtcataacatgcagccagctcttccttaatacattgccaaactctaaagattcatggaatgggtatgaatggtggaacccccaatgtcaagacaaaggtctgccaaattcttaatccaaaaggtcatgccaagaaatagtgaagaactagtgttgagctggtagataagaaaacagccatcatgcctgattgaatcgaggccgtcattttctcatatttgcctattagaagaaatgagagcccttttcccttctagtttagtttagttttattttattttgttttttttttttttccaagacagggtttctctgtgtaatagccctgtatgtcctggagctaactatagactaggctggtctcaaactcacagagatctgattgctactgctaggactaaagatgtgtagcaccacacaggtgtgataaacaataaagaacagagactacaaaaatggaaaaatgtggctagtaataaaaatataaataatggaaacagaactacaataatattgttattagaattaaaactgaaatttcaaaataagtgaaactattatattgaggaattagaagaaaaataagacaaaatgattaaaaagatagaatttcaccagagaatagcactacaatgcatgtgcacacacactcacacacaaacacacacgggggggggggggtcatggggtcacagggagattatgaagactagggagatagctcagttagtaaagtgcttgccatgcaagcaaagggacctgagtttaaatcccatgttaaaatgcggggcatagttttataatgtgggtgctgtctaatgtatgtctgtgtaccagtatctaagagggcatctgatcccctgtaactaaagttacaaacagttgtgagccattgtgggtgctgagaggtaaatgtgggtcctctagaagagcagccagtattcttttttttttcaattttttattagatattttctttatttacatctcaaatgctatctcgactaggccatcttctattacatatatagctagagacatgagctctgggggtactggttagttcatattgttattccacctatagggttgcacaccccttcagctccttgggtactttcaagcagccagtattcttaaacacagccgtgtatttctctagccccagtgccatgtagttgtaatctgagctcagggggattcctggaactagctgatgatcatccagtctaccctaattgctgaagtccaggtcattgagactctcctctcaaaagaactggaaagcattcttgaggataacacttgagattgtcctctgacttccacacatacatatgtacttgcatgcatataaagctgccaactcatacacatgcattttcaaaacagcaatctataggttcgtaagatggctccgtggttaagaacactggctgttctaccagaggttctgcgttcaattccaagcaaccatatggtggctcatgaccatatataaagggatttgatgtcctcttccggcatgcaggtacacatgcagacagaatactcatgcattaaaaaagaatacataggtaaataaaaatttttaaatagaagggacctaaaactaaaaattatggtatttgaagttaataacttgttatatgagctaagagaaggcttttagtcaatgaaggcaagatatccacataggataccataaaaactgtctaacctgaagcatccttataacaaggtagtaggaaaggcaggagggatgagacacgcacagccagagtctaacgtaagtgtaagggggctcaggaactgatggccaaacctttctaaatgatggaaaacattcagcctacacgtcagaaagctcagcaaatgcccagccagataataccagaaaacacacacacacacacacacacacacacacagctaagcaaactcagattgtatcaaagtgaacacaagtccctctgatcttcgaaagccctcaacgtaagattggaggaccttcctggaaagtcttttaacatccacatggaaaacaatcaggacatatatgactttaatacgtacatgagatttcatgagaccaggtcatcagactaaatgtaaactgaatggatcccagaagaatcgacactggaagcttattccttttgtccagtgaagtgtgtgtagcgaaatctgtttagacattgtgtcatctgtctgtaatgttctttttctttactgttgcatgtgtcccaaagttactatgcatgttccttcccctgacaagaatggcctttccaactcagctccatccacaccgcagacccctttgccttattaaatcatagatttttttcaggtcttcaacaaaaggtgacttcttagcatttcctgtcgctcctcactaaatgcaaagcctcactacacactgtcacatgcatctgcaagttttcagagtacttggcataaccgatgtttctatgtttacttgtggccattactctcatgtgcacactcactgcatggcagctccatggggcaggaacaggaacggcttcatccttgctgtttgtacaggctctactccaggtattggcacagagtgagcacccacttattctttgttggataaatgaacaaactaatggtaaaatatgaaaaagaatggtgagagtcagcattggataacaagaagaatattttattgggtcaaatcatcagttattccctggatgatttaaagtaccagaaagccatctacaagacttttttttcttcatagcaggtggcagttatcacactgacctgcaggtgctctggagataaagtaaaatgaatccattgaataattcttatttctagaagaaataaatggttcaccatatgaaaagtataaatccaatgtgaaggagtgagcaccttactgaaaacagccagttcacatacaatttttagcacagatgagttttcaagagtactgtggtaccgtcgccctctagtggccactttgtatgtttgcatggttattcttcccattatgtctggaatttctgttttaggtagtttcagagtttcaaagttctcattttgtagtaaaatatattggaaaaaatatcacagggaaaaatttgacagtaggtattaaaaggccctttaaaaatatttaagccagaaattctgttttccggaaccttctgaaaaaataattctaaattcataaaaaaatctttatgaaaatgcttaccagaatgatagttatgacacaaaaaacacttagacactataatttataacaatgcataattaatattgttacattgataatacatggttagaatctcagaaaattaaattttgactatatcttgggcaagttatttaatatgtttctgtatccataaacttgggttaaccacctagtagtttgctgtaaaattaaatacatttgtgcttctctacaaatcatcagaagcagtctggaagtaatagctattagaatgatttcataacaatgtttttatgaatggcatatgtgaatagttgggctttaaaacaacaagtgccatataattaggcagtttcagtgacaaaacccaaatctctataactaaggtaagaggtcacggaaggtatcccaaatgctaatgagattacggaggcacttctcttctccttttacttgttttccaaattttctttattgagcacatttttcttaaatggaagtgcaagagagtcaactattttttaactgcaaactttgttttcgggtagcagacttatgttaagaactcaaggcactcttgtgtcttggtcgtctcccatgggagtgagactcgagcagcctgattcactgactgccttgactgctgagctgctgctctgcttcaggatctcacactctcccggcttctgtcctgtgtggctgcattgccttttctgtcagttgtgttccatctccctagatcagcgctatactggtgcctcctctgcactcagagagagcttagcacgtttgtcccttccacttgagtgatctcacccaggccccagatttagttgaaatgccacttgagttttagctaattctagatgtacttaagttgaaaaacaagaatagccattacaacacatatttgaattggaaaatttcaaaagagttgagcaggtgttttctcagatatattttctttcccctgtttacagagacaataatccataaaattttttaactgtctctgtccatatttaaagtttttactatgtacatatttttggtttgatgtattatgtatttttgtataagcttagtgttgctttttggggtctgttttactagttgcttcagtatcaacttttatttaatagttaaggctacagtatcagtcttcagaagcatgcatataaatatagtcacagaccatgaatacccattggacaggatgtctaccttcgggggaaaaaaaaaaacctcaaagtaaacaaccttaatgctgaggcccactaactactgagggaacttcatccaaagtgacaagccatatgacacccttcccatggtcacaagacccttgtctcaggacaaaaatgaaacagatacacatgctgaaagtaaacaaaaatatttaaattatatataggtaaaataaatattattcctggtaaaactcaatcatgtgattctttctccaatttttttgggacagtctttagttttagtcaactgacaagttaaatatgtttatgggcttagtttcaatacctggaaccccggggaaagatcacacaggtattagcacgtcccatcacttctggtaggcatcaagaccttgttgttgtcaaatatacatcagttgtagtcacctcacactgtaaaagaacagaacttacttccagattttaccctaaaactgattgactcttttctcatctctccccgtccccccattaatgttgctttttttattatactttattttatatatatgacttttttctgaatgcatgtctgtgcaccatatgcatgcagtgcccttgaaggccagaagagggtgccagatctcctggatctggagaaagatgattgtgagctgccatgtggtgataggaatttaaatgggggcctctgaaagaatatgcagtgttcttaaccactgagccatctctccaacccctactgtggctttctgaaattctacaaaattaattttctctatatatgccattctttgtttttcaaccaatgctgtctttaagatgcatgtttgtatgcataagtagttcattatagttcatagaagtatccaaagtatgaaagtgccgcagttatatactcttctattaatatatattatcttattgttttatttgcacaaagttagtctgtttttagtatatagccaatcaatgagtgcatattgtgactataatcacatacccaacttttctcttatagaacattgaattcctagacttagctagttcagaaataaatcaagatgggctggaagaatgactcagcagttaaaagcatttactgttcttgcagaggctacacggtgggttcccagcacctgtattgggcagttcacaagcacctggaactccaattgattagagttccaattcctgttgctggttgccaagggcacttacacaaacatgttacacagaaacacacataggcatatacacgcaagtaataaatctttttaaaaaatagatctacttattttatccatttatgtgtataagtgttttgtctccgtgtatccccaaaaaggtcagaagaaggtatagagaatccctttgggctgcagtgacagttgtgaggtggcacacagatgctgggagtcccagattgtctgtgaaagctataaaggcatttaaagatgagctatctctttatctctaaatctctcctctcctctcctctcctctcctctcctctcctctcctctcctgtcctctcccttcctttcagaaaataacacagaataaaaactaaatagtactcctgcttctttttctgtataatctgtggtcttcctgaagcaggcaggattctaaagtttgctaactctgaaacaataattcttttaggtgcttgtctaaactgccaggaaaatagtaaaggggaacactgtgaagaatgcaaagaaggattttatccgagtcctgatgccgcaaaacagtgccatcgctgcccgtgttccgcagtgacttctacaggcaattgcaccattggtaaggtctttctttaggtctttacttccttctccgaagtaaactgtattgatgaattaggttactagagggtatatgtgaaagggagttattaaaaatcacaacagtttactttctaagaatttatatcaaattctaatccgcatgtgaaatgagaattcagatgtcctagccaacactgtgcactgtgtatctggattctctcatgtggcatactttcagagttcatcatattgaaaaaggtatcagtaatgcatactttttttgtaaattgcatagaagctgcattttatttattctttcctgaattggtggacatttaaaagtgatctgctataagtaatgcagctatgaacatttctgttcatggttttgtgtatataaatgttgccaatacaccctcaagttttccccactactggagattgagtttgggaacttatttgttgggctagcaaagcgctctgcctctgaattgtattccccagtgtttgtgtgtacaaggctgttcatttctctggggcatgtcactaggagtggaatttgctatgtcatttattaattctgtttaactctatgaggaaatatcagatgattttccaaaataagaacacaattttatattatcattttgtgggggtggaataagtatattttgtatgagtttgtttggacagagcatgttatatattaaaagcaaagatgaacatcatgtgtcttcaacctccctccaccccatatgtttaagagttttttgtttgtttttagttatgtgtatacatatgtgtctgtggactatcatgtacatatgagtgtagtgcctgtggagaccagaggagcatacaatcctctgtgttgagatgtctccctgtcctccgacattattatttttaggaagaataaatgagggttctaaattgtcgacagacttaaaacacttactagctatcttttttatacttaaagccatcctagtagatgtgaaatgacattcactgcattatggttttaatttttctgtctctgatagctaattttatggttatttaccaatttagaatttcttttaagaaaatactttttgatattcttttgttcatcttaaaattatattttttatcgttgtgtttatagagtagtatacacaaatcacttgttagatatttgatttgtaagaaatgagtatataattctatggaaaagtcattgcctagtaaatagaagatcctgggtttgatctctatttagttataaaatatttaaataaaaaggttttaaaaataatttataaatattcccatgacccaatttttcacttggtttatctcctttttaacaaaaatgatttttgtttgtttacttgcataatttcagaggcattcagttcaattttctttcattgtttatattggcttggaatttctcatgagactgtcgtcaagattttaggactgtagtcagtactttgaaggcttaattgggactatagaatctgctttcattatggctaactcatatggctctctaggggcaaaaaggctctgttagtcatcataaggacattttcattaagctaattaatatccttgcaacatggtaacaggcatctgctacaatgaatgatccaaaaacgggaaaaatataagccgtggtatgttttatcatgtagtctctaaagtcacaggggtgtttgcaataccccattaacttattcatgcctattctgtcaagtatgaacatgtgatcccaggagttgggaacatttggcagcatctgggaagtcagttgttacgcctagaaataggaactggcatgtttctcttttcataggaagctattaaaaatctttcatttattccacagatagtaattaagaacctagcacatgctttttgttgtgatagacaaggaatacaaaagtctaaaaactaagatctgggttctaaattagcactcagtgttatagaaaggaaagcacacaaggtgtcaaacgtagtccataaacttatgggcatgcacttacaggataccaagacacttgtatcgttatccatgggactagatgtttttcctatttttcctaaagaagatgattctttcacatagcatacactgttatttgtcactgtataagtatgtatatattgaattgttagaataagttaggattgttattttgaatcaggaatataaaaattgaatattaatatctaaatgtcatctgcaataaaataattctagagaatataagaattctttgtattggcatgctgttagcaacaatttaagacctttataagatttgtatatcagaactgtggctgctcaagttcttggctcatcctttacacacagggctttacttaaggtgctactttctttagttgagtgattcactgggttctctttcatacaatgaatttaaaatgtagaaaatttccatgaaaagaaaatccctgtgaaaagtaatgtttgaaagcctgtgtttctatatgccttttctatacactatatactgcattagaatagagatgatatctgtatttctaatcatttaatctctagtcccattgtcttattgttggatgagtagaaaaggagataactatctcaggggagagactaattacttatataaaactgaattgggagccctttggagagacttactgggaaagacagaaaaagaaaagtctttatggaacagcttacatttaaatggagccttggaaagtaaggactgggacacttggagatgtatctatgtagaggtaatagatcacagctagagactgcactgggacatgagcaatccagttaggcatgcatgtgcctataggggttgaaagtactaagccagttcagtttgagacttacagagaccactgtaagcagtggcttagctaaactgctttgtgttcctgacaggtcgcatgggcacacccgcccaagagccatctggatttgcgaatgaaagacacactcatacagcagttaattttaaatgtatgttcactagctcaaaggatgagcagttctaatccttcctgaggctagcacacatttctctccaatattcctggcttaacgctctaattctgtattttatctttgttgccctggctccttctaggcggcccactagtctttgctgcccaagacgcttctagtagctcttctcggggccacattcctttgagattttttttgggggggggggtaactctaagtctgatctgccaccctccgaatcctggtgattttcttcttttttctcttccagtccttagaccacacaaatctaaaggtcttgtcttattcaacctgtctagctggctggctgttggttatttacttacttatttcactaattatttttatttgtttacatttcacatgatatccctgttccaagttcctcctccacaaacctcccatcccattccccttcttccacctcccctttgcctctataagggtgttcccccacccagtcatccacacctgcatcaatgtccaaacatcccccttgatgctgtggtattattaagcctatacaggaacaaggaacttccctcctattgatgtcagataaggcaatcctctgttacttatgtacctggagccatagttccctccatgtatactctttggttggtggcttagtccctgggagctctgagagatccagttagttgaaatcattcttcctatgggttgcaatccccttcaggcccttcagtcctttctctagttcttcaatggggtccccttgcttagtccaattgttgactgtgagtatctgcatctgtattagtcatgtgctaacaggaaccataccaggctcctctcagcaagtgcttcttgtcatcagcaatactgtctgggtttggtgtctgcatatgggatggatccatttttttccccgtctttcctttggacaggaatatttctgggttaaaaattttgagatgtgtgggtagctccatccctcaacttgggtccatgtcaatctactagaggaggtctctacaggttgtatctcccctttgttgggtattttggctgaagttatccctgttggtcctggtagcttcttgcttccctggcagccaggactttctagtggctacccccagttccccatcctacactgctacatatttctattcaatttcatgatcttctgtatttctctcctgtcccttctaatacttgattctgctctccctttttccctctccctactttttccctctcagatccctccctcctgtgattattttgttcccccttctatgtaggattgaagcattcacactttgggcttccttctttttttttttaattaggtattttcctcgtttacattttcaatgctatcccaaaggtcccccatacccatccccccaatcccctactcacccactccccctttttggccctggcgttcccctgtactggggcatataaagtttgcaagttcagtgggcctctctttccagtgatggccgactaggccatcttttgatacatatgcagctaaagacaagagctcccgggtactggttagttcatattgttgttccacctataggattgcagttccctttagctccttgggtaatttctctagctcctccattaggggccgtgtgacccatccaatagctgactgtgatcatccacttctgtgtttgctaggccccggcatagtctcacaagagagagctatatctgggtcctttcagcgaaatcttgctagtgtatgcaatggtgttagcatttggaagctgattatgggatggatccctgcatatggcaatcactagatggtccattctttcgtcacagctccaaattttgtctctgtaactccttctatgggtgttttgttcccatttctaagaaagggtaaagtgtccacactttggtcttcgttcttcttgaatttcatgcgtttggcaagttgtatcttatatcttgggtatcctaagtttctgggctaatatccacttatcagtgagtacatagtgtgcgagttcctttgtgattgggttacttcactcaggatgataccctccaggtccatccatttgcctaggaatttcataaattcatttttttaatagccgagtagtattccattgtgtaaatgtaccacagtttctgtatccattcctctgttgaggggcatctgggttctttccagcttctggctattataaacaaggctgctatgaacatagtggagcatgtgttcttcttactggttgggacatcttctggatatatgcccaggagaagtattgcgggatcctccgatagtactatgtccaattttctgaggaaccgccagactgatttccagagtggttgtacaagcttgcaatcccaccaacaatggaggagtgttcccttcttaagctctatatggtttgtaagttgtatcatggacactctgagctttggtgctaatatgtacttatcagtgaatatatactatgtgtgttcttttgtgactgggatacatcactcaggatattttctagttccatccatttgcctgcaaatttcatgaagtcattgtttttaatagctgagtagtacttcattgtataaatgtatcacattttctgtatccattcctctgtttaggtatgtctgggttgtttccagcttctggctattgtaaatgagactgctataaacataggggagcatgtgtcctatgttggacatatgtgtccatatgttggagcatcttttggttatatgcccaggagtagtatagcttggtcttcaggtttatttccaatttactaaggaactgccagattgatttccaaagtggttttactgttggctctttattgattaatcaaaaactaattggagacaaggaccagcatttagcatttggacatatagatttttgatttggggtgctggattaattcaaagcattagaatcaatccccaacatttcaccttttccggctaatttttttttaaaggctcttctcgcagacataaattgagcataaccataacaattatgtaaattataaagtatggtatacaattaacatctggtccatcatatttgtcaattagataaagtactagatcacctattctaactaaagagcttataattctatacctgaattatgttttgattttagccagtatcaccatataaaaactatctttttaactctatatcatctttctcaatgctaagtaacttgagtttgattttaagactataactagcaaccacatcagaaatccaagaacaaatattacctgaatatttaggaagcacaaaagcatcgcttccaaaacttaaattgtagagacagctgactacctagacagtcttctattcctcaaaacatcaaagaatctgtctttagtattttggctcagagccatctggcagaccttgaaatgaagcatgaatttgaaggactagcttaccctgtattggcagagcttagcagtgtgtgtattccacatctgtttgttctctttggacagtattttttctgtagatgaatagggaaaattttgtctagtggctaccttgtcattattggaacaactctatatggaagttgagcagcggaaaaaaacagagaagctgtcaggaacagacctgtctcattttcaaatgaaccttaattatgtaataacattaaatgtcatattctgtggattttttgatgtttttgaagactatctttttatgtaaagtatatctgaactgttaaaccttaactactcttagccatttctatttgaataaattgaaaacaaattattataattcaatcaaaatctgacataaccatgagttcactatctggccctttaacttgggttacttgatcatcctaaatggtttgtaatagcagctattagaatgaatgggaagccttgtattcgtaaatgagtttcatagggataatccctatctaagagtaacaatattaatttcaaattttgtatcaacataaagatttctatcaatgaaaaccttaattctatatgaatatataaattctgtaccaatataagaaattataaccttaattttgtatcaattataaggatttctattaatgtaagattatggctatataatgctttaagaataaatttagtaatccatcccatgtatttcctccctgttcaaaattatgaccatttccaagttatcttttacaaagacaacctatctataatttataaaataatcatacccaggctcccaaacccaagggatcaggatgatgactttccgtggcttcttcctgctgaataggggtcatgagaaattctttaaagcggtggggggagtaggaaaattagaaaaataggttagaattaagaaagctagcttctgcatctgttacccagcctctgtatgcttagaagactcagggcttgggggagatttttcactggatctgtctgagaggttggatgaaaccagatcatctggaatcaagtagggattccttaagctcatctggaagcaagcaggaagcagggtgttggaacagcaggtcagtttatcatctctaaagttgaatcttatcaaagctgtacattctgtagtatatgaatctcataaccaatattttaataccatttgtatttgtatggattgcgtaaggtgtacaaattaagttaaggatgaatttagtttttttttttaattttttgaacagctgaaagacaactatccttttatgagttaatatgattaataaccaattgtaataaatcttcattcatgtcatataaaggagggcacaaagaatcttaaggattctataaccaacaagatttattgtctaataaatctgaagatttgactagagacatttttatgtctaagccagttattgggctgttctcatggtgaagaatcatcaaatcaagttacctgtcttgttnnnnnnnnnnnnnnnnnnnnnnnnnnnnnnnnnnnnnnnnnnnnnnnnnnnnnnnnnnnnnnnnnnnnnnnnnnnnnnnnnnnnnnnnnnnnnnnnnnnnnnnnnnnnnnnnnnnnnnnnnnnnnnnnnnnnnnnnnnnnnnnnnnnnnnnnntggtggggagtagctgtctacccccatcatatctgatccatctcactctggaaggggtccaaactctttctcctttcctgtcaacacaaataacagagcctctctcccaaaatactatatccttggtctagtgattagaaatcattaaaggtgtagcttgtcctctctcccagagaaattttaaagtaaccaccaaattcataaccatatgtattttgataattaaaacaattcaaagcaattaaagcaatctaaacaaatattatttgttgaggcaatgtgtcttcactgtcccctgtcttgttctatatgagatcaaggcctaagttatttatacatctatgtaaacttaatcctctcttctatggacattatgaaattctatggaaatctgtgggtatatatggtagtatgtcattttctttttatataattatctaggcctaagtttttttttttgtctgatataggttaggctccctagcccttgcttttcggtcaaatttttaaagatcaaaagcctcagtcatttatacattcatgtattcttactgtacatgccaatttccaggcgctattcttgtcatgccaggcaaaatcaatcccagaaatcccatgtagatcatgttcaaagatcccaagtatttgccctggcaagactcttaaatttctttaaagcatttttttttcatttaatctccctaaattcttccttttgcctttattttctacatttgagatcaaaggcttggatttcttaatttgatatatatttaagaacattttagcaattatcattctattttcttttatccttaaaaataattaaatcaatttttatttatccctgtctattgattctttgtttgtaggaataggctgtgtctatcatctgactctgtttcagagcagtcatcttgtctctttgtatagcaggggctcccagcatcttagctaaggctctctgaggaagctagaactcttttaaaagggcttagggtaaatcccagcaggaggctgtgttcctttgttctagtttcatggcttgtgtgggaaccacatgtgactcagcttctcttgctgagaagccagttcttcccctcctcataaacttatctcttatggtgcatgtatattccattcagaaatctaaattatttttaatagtgagggtttgcctatcgtgttgcatccatctgaatgatgaggattggttctaatgctctgaattaatccagccccccaaatcagaaatcagcatgtccaaatgctaaaggttcttgtccccaattggtgtttgaccaatcaataaagagccaatggccaatgagtgggcaggtagactgaggcatgacttggggatttgcatgggctaggaactataagagaagagagagataaccatgtctcagagggagacagatcagatttagagtggcagaagaaaattcatccaaaatgtaggtgcaaagggaaactggccctatggaaggggctgcccagaaagtaatagggcatcaaagatgaaacatggatttagaaggtgttgagccaggactacttgagggtaatgtaggctagcctggtgaaggattagaactgcccagccattgagctaggcaaaacatatttaaaattaactggtgtgtgtgtgtgtgtgtgtgtgtgtgtgtgtgtgtgtgtgtttcatttgtgaatccagtaaatgcttgtgcaggtacatgcatgcaactcatcaggaacacaaagcagtttagctaaactgccactacagatcactgggtataatgctcaaacaacttataaataaattcagtacagttagtaagtttataatataatgggtgcactaaaaagtgtcttagggtttctattactatgataaaacaccattaccacaagcaacttggagaggaagggtatatttcattgtaaactttcaggtgacagtgcatctgtgagcaaagttgagccagacctcaaatcaggagcctggatgcaagaactgaagcagaagccacagaagagtgctgcttactggcttgctcctggtgacttatcagtctgcttttttcatagcatctaagactttaaggtgtgctaacaccatagtgatctgggccctccctctgccccatagtcttgcccatagaccaatctatggggacattttctcagttgaagttgcattttcccaaatgactctagcttgtgacaagttgacataaaattagccagcacagaggggaacattcgatactagtgagggagagtcagtgatagtttctgaaagagatggtcttgtgatgagaaccaatgagagcaaggacatttcaattcatgaaatcattatcccagtcagcagtaggaaggaagagtcagaagaatcaaagttcaaggttagcctgggctacacagtgggacactctctaaaaacgaacaaacaagaacaaaagcataacaggaatgttaaaaatcactgatctgagcaaagaatatcttagatgtggcagaagcaaagtgcaagggaggaggaataaagcaggagacagattctgaatatcatctcatgaggtccacagaggatacatatcagagagatgaaatactctcacaagcctccatttcagcccttcaatctattctatctacaaggttttgaaatgagtttttgttgcctataagaatgaaaacatggcaccatagtgagttataagcttcttaaaaggaatgtatttttttgagtatttttctaatatatcatctgttacaagcattctgaattcattctgttttcattgatttttatgcaaattaatttaagaatttctggctcaaagtccttgtttgaaatatagataatcaaggttctgagtttattacctttagttgatccctcatgacctactgagactataaatactaaactaaatttgtttatcacttatacaactctgtggcttatactcaaaacactggacttgtatactttagatgacacattaagaattgtttctcaaatgaaactcttaataacatagacagatggattcactttttatccaaagtctgaggagcagtccgtgctgcagcttttatgccaactgtaaattattctttctgtaatgaaatactgtgtttagagagcattattattctgtaagtaaatttgtaaattctaagaaattaagaaatcacttatcagccaggcatggtggcgcatgactttaatcccagcactcgggaggcagagacagaggcaggcagatttctgaattcgaggccagcctggtctacaaaatgagttccaggacagccagagctatacagagaaaccctgcctggaaaaaaaaatcacttatcaaatctaattgagaagcctaaactaaaatcatgtagagatttgaaaagagcagttaagtatgaaccaatatgttctcactatgtaagatgaaattgtgtaagtagcaaacatttattgaacaaagagtatatgtcagatattacaaaaatactggaggtaaaggtggaacacaagtagcttatagtttagttggtgaaataaacaataatctaattattgcatcttaaatgttaagtgttataggtgaagatagaataacactaacctaaacagaaaataaggaacaaacttttttgcttctgagaattgatatatgaattgctgcagtttatctctataaggtgactaatggtagggggcaagaggatgctgcatatagcagaaacagtatatatgaaatgttagagagaagaaagcaagcattctttgggagtgtcctaaagcatcagacaagcttgaaacaaagtagataatgaagtgtgaagagatatgagaggagttaagaaaagtaggcagggcttacaaaattttcagtagaagattgtattaaattttcacttagttccagagccattagaactgtagcaagttctctagggagacagtgtgtgtattcagaattactttgaagatcatagagactgtaggactatactgcagtaaagacgccttaggaagtattgagagatctagaagtaagaaatgattacagccttaaccaggtgcagaatattggagttgaaacgtcagtaggttgggaatattttaatatatcactgaattgaactgataactgcccaaaagcaaataggagatgggggctgagatttccttcttagctttggtacctaagcaagtggatgtatgttgggaccattcactaaaatacaggaaacttgtttggacaatcatctatgttaaatttgaaatgcttgtagacccagatatacaggcaaattgtatatcatatacagtttgtaatttaagacagagagatggactggagataatacaatttccattgttgattatacaagtgagtgaactcacccatggaaaatttatagaatgaaaggggaaagaaaccaagcgtagcactctgagaataatggtcttgggtgtagctcagtggcagaaggtatttgccctccatggaagaggcctcagattaatacccagcaccacacaaaagaaagagatgcctaggagtatcaacgtttagggaagcaagagatggaaaaagtttctccttaacccatattctatggagtcttttatgcctcaaaggaaaaaacattttaaaaataacaaataaacatacaagcaaaaactttttaaggaactgtgaggtggttcagtgggtaaagatacaagctagtataactgacaatctttgagtttggtccccagaacctacacaatggatggaaaggacaccagcaagatgtcctctgacatacaaacacatagtattgcccatgtggatcagcgtatatgcaatatacacacactcacactctatgcaagtgacaatacttcacagttattgaaacttctagtcaaagcatggtttttttaccctttacttcagtaggctttgtggataagcccatcattccttcaatacattggaaagttaataaactatatagactattggttctgtatgtctcttgaaagaagataccagggaggatttttaaaaaacttttggtgggcaaatagttttctatcttttaatgtagcttgagactttactaaattattttaatgttcttcctatttctatttctattattctattagaatctggagagttggagcctacatgtgaccaatgtaaagatggttacacaggccagaactgcaataaatgtgaaaatggctattacaattctgacagcatctgcacacagtgcgaatgtcatggccatgtggacccaattaaaactccaaagatttgcaagcctgagagtggtgagtgcatcaactgccttcataacaccactgggttctggtgcgagaaatgcctagaaggctatgttcgagatcttcagagaaactgcatcaagcaaggtaaaactccaactaagattacacactgagtatctgaggctagcattgaatgttgcaagacagcttccattagctttgtacaccttccagtcctaccagagaagtttctggaaataaattttgataggtatttgcctaaagagggttctttcccatcttactgtcttctgatcctccagcatcaattccagaaacatgaagaccaagaccaagtcgttgtgacaatgagaccgagtacactcatatttcccttcttctatctgtctgttagaactgaaaggtcctgaaagttcttttcctttgcttcttgacacatcatttcagtgatcatcaaagaccttttcagggacggacctatactcaagtctatcttgaagttccatctgggaaactgcagttctttctagcctcttcacacttttgagctgacatggctctgtgtgtgatagatgaaatcttattaatattcactttgaattttaaaataaaaagcatatgatgaaatgttccttggaggagtattcagtgagaatttagaaaaggttaagttatgacttcaggaggagctagggatattcagggattactattccacagagaaattaaatcccacaatgtacaaactgcaccttgatattccaatatacactgattactgaactgaggtacaattggcctctgaccagtggcatctttttggtattctactacagtgataagattgaaccacatcactagcttaaaatgctgtcacttagcatgtgtccaaacaaaagtgcccagaagataggattgtgatgggatttttttttttttttgccatgaaggaatacaagctttggctatttttaggctaactaatgtagtagactgaagtgatgaacagtaatagctatttttattataattttattgagtacctataatgatcactaatatacacataaagtttcccaagaactctgtgaagtagacattattattcgtatttaacagatgaagaatctaaaattctaagagattaacttacttgtagcccaaaccactccaaaacctagcccaaagcttttcagccttccactgagctatgctatctatcataagaggtctaaaatgtagctccttgatcataaagtaattcaacaacacacaaagcaagagctctctacacatggaattaaaggaaacctcttttctcttttggctgacaataactctgagcattaaattctgttttctggaatataattttatagtttctttaaggataattttactttcataaaattccatcagatgtgatggatatattctatgtcagaaaattttcattttaaaccatatgatttagagcttaatggtgacatatttacagcctttgcagaaatgtccatgatagataagaagggtggaaaacgtccatgttagaatttttctaaaggtttggtgtaggtgttatacacattaaagaacagacctggatgtaagatgtaataaatgagctttccagactccatttcttatcattgtatttatttaaaaattatttttaacttgcattcctctaagcagagtaccatgtcaacattccatatcaactttcactttcatgtgtatttcttttattgtttctcaaaactagataattttgtcttttacatttcattctctgtttttattttcagaagttattgttccaactcctgaaggttctaccattttggtttccaatgcctctttgaccacatcagtgcccacccctgttataaatagtacttttgcccccacaaccctgcagactatctttgcagtaagctcttctgaaaacagcacctcagctcttgctgatgtatcatggacccagtttaacatcatcattttgacagtcatcatcattgtggtagtgctgctaatgggatttgtaggagctgtgtacatgtaccgagagtaccaaaatcggaaactcaatgctcccttttggaccatcgagctgaaagaagacaatatcagtttcagcagctaccatgacagcatccccaatgcagatgtgtcgggattgttagaggacgatgccaatgaagtggctcccaatgggcagctgaccctgacaacacctattcataactacaaagcctgagaagctgagttgtcctcctggattgtcagaaaacagtgctcacttaaacagcacctgacctctggctgcacagagcctaggtagagtttgttgagaaaggtattgtgcaaatgttcaggtacaaactgtagtgcgcttagcctgtctgttgctcttaattcccccatgaagatctgaagcactcatcatcgaggacttgaagtaaagtatatttttgtagcaaaccacatgtatatatggaaaggctgaatcccacagagcagcctaagtctacctggcctctcaaaggactgctcggaaagtgttcacctcaccagatgtgatagaatgttgatgtggaggggaaagactgatggaagaattcatctccactttggaaacatattttataaaagagaggcagggattgtgttcattttactgtactaagagatgtaacttaggaagagatgatatctaggctaataaaaaaaatcttggttgtgtgtagactaagaaaggtgccaagaagttctgtagaagggcttggctttccttctaagagtctccttcaaaaatggagttaaagcacaggataagcttccatggtgagggtaggcacagcaggcagagagcagaaagctgatggtctcctcaaagaggttcctgcctctaaagaaacaaggtgtacataattaatgtagcattatctggtcaacattgtacttgtatctatttgtaaaaaatcatgtcctattttatcatctagactttatctgtatagcagttaatggtgttgtaaaaagaagatatgggaacttggttaaaatactgtaaaataggtgacaatattgctagagctgggactctggtgagcatcagtcattttagtccctatttggacactgttgaaattgataagaggtcaaatgtttctaatctttcctctctcaacctagagtcatatgctctttgacttaccatagattcaagcaatagattttgaagtctgcaattgcgaaactggaacacaggctgcattctccagacacacctaattagccactctgttttacactgctcagtgtaaactcctcaggaaaagacttctttcctgaatgtaaaagacagtcttccaaaggacagaaaatttaaattaaaaagaaaagccatcacatcacttcggggttcttgtttttatgcccataaaatatttatgtgcctcccatatctgccaaaataaaggcctctgacatttgagcataacctgtcacccatgcaccatgaggactgtttggcttcttcagtgctggagttcatccatcttcatatctgggcagagggtcactatgggtgtgtatttagtccttgctttttgatgccattttccctgaggccaagtactgctgctttcatttgttatgcatccataggttgtagattgagagccaagaaaagtgactcagactatgaagtaggggaaaacaaaacagagtagacctaggaagctcagactccttttcttacttcctcagaaaaataaagacgttggtcatcctttgtaggagacctcacctttttctcagggtttagaaatgactgtatagaggatccataggtaacctgggtgtgctctgcatttttggctgtctttataaaggtagacattacatctcattgtactaaaacaatttacaagtgactgattgcctagcatatgagtctatgagtttaatccttagaattacaaaatatattaataatattttgccctttgtcatttaaaaaacacctttccatgtgttctttgatcctcaccctagcctccttaggaagtagtcttgtgctcatttcatagatgaagtaactgaggcacagagagtctaagttgttcagcgctataccatgcacatcatcattattattcctggaatcagttctcacctctacttcattgtcattttgctatgtgatacatataaatctactagccatgggccctagaagactggaatggaaattcccatttgtggatgcttctaatagagcccttgtatgctctctagaatactaccccccccccccaccccgccataccatgtgtatatattggggtaggggaagtatgtaactcacaggcacaattcagggccacatagatactaaggactttgttgaaagaacacacatggatttctacctaaagacaagattaatgacgagaaggtaaagctgccagttcattaaaatgaatgaattcctgaattggggaggggagcagagagacttttcctagcagttgcagcacaggtgtgtattgactatacatcacagagttccaaagtgctgagcacaatggctgcctcccagataccccatctcctgccaaaataagtggaaaggagataaaagccaaacgtttgttaaacagttcacacaataaataaatgtttatatgagtttaagagccaaagtaaacagtcgagattccagctaaatagagattccatgatacagatcttaagagataacacagaaactaaaccacaaatttatcaagtacctgttaattgctcctaaatcatgtttttcacaatgaaaaaaggtatagccttaaaatgtgttgtaaataacatcatttagtgaccccgttgctctgcttatacaaattattttgttgtaaagatcaaccatgaggtgatctctccttgaaagtagagtaggaaaccagaataaaacatgctgctgggttttcattcctctggagacattatcacccaatgccacgagtcctctgcaaagcccgatgctggaacaatttttgtctaagcataaagaaaatgttgtttttaaaatatactacatacatgaccttaatgagaaatggatgtcagtgctaggaaggaactaatgcttgcgccttcaatagctcccctgattaagtcctgtgcatttctgaaggtggatgttgtacttgtcaaccatgcctttgttcccttaccaccaccatcccctacattgcctccaaggactctcctatttacagtctctccagagaaagcaaaatgataattaaaatctcttatttatatgaacatggtgtggacccagtacattatttttcccagggatacttagattttaagggagagcaacaggacagacatgggctgggagggtaggtttttattgttgttttgatttggtttttagttgttattgtttcatttttttcttttaacaagactatctaaatcccaaattatattacttttccctagtcccaatatttccagaatcattagtcatcaaagcaatactcactggtctaccagttaatttgagttatctgatcatcaagatgttgtggtttagaataagagtcagttagagctttattattcaccattcaccctggtcctctgctttttttatgtttataaacataaaagtaattctgatgattctctctgacttggtgtagtttgaagtggtgtgtgggtaggaggtgggtttctgcatctttcaaggaaagctctctgacaaaatattcatattcagaataagttaaaagaattcagtgaaatcattaggacaacagaagttgtgacctaatccatacacaaataaataaatgaataaataaataaatacctttagtctgttggtacttttgacagcaaatggtttaggacttaagaggtttggtgtctgtctgtgttgtagagctggggaaggtgacagacggttaatttgtcttttgctatcactctgagcaaatggctaagcagcaggaacatggtgattaacctgaagaagtcaaataatattgaatggctaaagattgtggatcattaaaacattagtggtttgaatgatactttttcaaagacattgagaatcttccttgttacttatgcatacacggaaagttcagcagccttggagtgagcccagagcttcagattcaagcttgcccaaagctaaatgacttctagtccacttttaatgctaggcacaagcattctttactcttaaatgtcagtccaatcaattagggtatgtttctaaaaattaaacttgtatttatgtcactaaaatcctaacccaaaatttaaaaacatgtctcatatgtgtgctgtactaggcttcatgatgcatttctaaatttgtgtatgatttgaatatatgaaagaatttatacaagagtgttatttaaaattattaataaatgtatataatttgtaccaattgtagattcgtttcacttttttatgtagtgagagatttaagaagtctacaggtaagtgctaaagaccacttgtcagttcattccatagaagtctttacatcctttctgtactgaccaatattttgtttaagttcatcaaaggagtgtctactacttggggagaaaataccatatggaacaatgcattctcatacagcaaaattcacaccagagatgaaaatatatatgaacatttattactgggccggggatatggcttaggtgtaggtcacttgcataccaagcccaagtccccaagttccatcctcagcacttataataaacaatagcatatatttttgttcacaacattttttgtcttctgtgccacttcctgagatttctatcaaacttatgtgctgttcactgagatttctatcaaaatatgttgagactgattccctttggatttctgacttatacatgtgaatattttctttttttaaatgatttttgttagatattttctttatttgcatttcaaatgttatcccctttcttagtttcccctccaaaaattccctatcctctccccctgctcaccagcccacccactcctgcttccttgccctggcattcccccatactggggcatagaaccgtcacaggaccaagggtctctcctcccactgttgagtgactaggccatcctctgctacatatgcagctagagccatgcgtctcaccatgtgttttctttgattggtggtttagttagtcccagggagctctgagagtactggtcagttcatattattgttcctcctatgagtctgcaaatcccttcagctccttgggtactttctctagctccttcattggggaccctgtgctccatccaatggttggctgtgaccatccacttctgtacttgtcaggcactggcagagcctctcaggagtcagcagtatcaggctcctgtcagcaagctcttgttggcatccattcatctggaataacaaaaaacctaggatagcaaaagctattctcaacaataaaagaacctctgatgaagattttctgaactctggaaatgaagtacattctatgttttttaggttacccataaaagagtgcatctttctattattttaaggttccattgaagaagtttggttgtgtttttgtttttttcctgttaaactgtgtttaatgagatgccatctggttatcccattaaacatccaagggtgttttgaaaacatgcagcaagaagtctctttgcactgagaactttaaaaccttaagtcaatttattctacctcagctgctcatgatagcgcacccctgtgatctcagcacatggaaggtgaaagcaggagaatcaggaggttaagatcagccctgactacatagtcacctctaggctagcccgggctacgagagtctctatcttaaaaagaaaattacatttcagttgaaaaattttaaatatgctttataaacaaaccttcagtagttagcatcatatgtctgtatgatatatatttggtatgttaagggaacaaaataattatgccagttttcaagagaaaaaatatgcaaacaacacactaggagaaataccactaaaagtataaagtatttttatatttctgatgaaagtctataaagacatctccattgcattatcacaactgattgtattaattttcttcaggggagtagaacatgttccaaaagttcaaatgctctattgtaatttaaatgtgacaacaattgtaaataaaaccattataatcagttttgtcttgctgatttttcttatggtgtaggacttcagaagactctgatcctcatacatgctagacaaggtctctagaacttcttctctaccgcttgcttatttagagcttcaaaattaaactaggaatggtgatgtgattcaatcagctgatagaggtacttattgcacaatcctggagactggcgttcagtcgccagaacccaagtaaaggtggagtcagagaactgactccactgagttgtcctcttgactccaacccatacacaaaataatatttttttattaaaaacaacttttatgcaaattgatagtgttaggagtgtgaactaacagatggaaaagcagcaatctatgttagtattaaaaccagtgttagctgtaaatttttaaaagacataagaacaattacagtatgtagtgacaatttttgatttttatttcttaaaaacacacacacacaaaatcacaagtattatcttagggttttactgctctgaacagacaccatgaccaaggcaactcttataaagtataacattaaattgaggctggcttacaggttcagaggttcagtacaaggcagaagcatggcagtgtccagccagatgtagggctggaggagctgagagttccacctgttgtttcaaagatggctaggagaagactggcttccaggcaggtaggatgaggctcttaaagcccatgctcacagtgacatacttcctccaacaggggaatacctccaaatagtgccactctcctggccaagcatatacaaaccatcacaaatattataagaatatgttttcattttaatcccaggtatgcaatatgggactgtttcagattgtccactgcagcttactatgcttagcttcatgctctaacagggctgtgattttaccagctgcagatagcttctgtgattctgtcttttggagttctggagactctttagaaggtaaataaaagttagggcccctagaagtggggtgggttgattggtggtgatggtggtgagggttggttatggtttgttaagtagttgtgtgcaaagaagagattagatatcttaatctaagatcaaacttgtaccaaggaattcaacacagtcagcaggattatgatattgtttccccctttctgacacctgttaccttttttctctcctgtctagtataagggggttgaaagggtaggagaaaaggggtggaagagggtggaggaaaaaagaaccacaaagtagcaaaagacacctacagattttctaatgcttctctttataaaatgaaagccattgtacaatgtcaaatggtattgttcacttcattatattaataaataattttaaaacattcgggatagggctggggagatgattctatcagtgttcgttgtacatgcatgagcacttgggctcagattcccagaactcacagaacaaccacatatggcagtatatgtctgtgacaccagtgttgtacagccagattaggcagctcccagtagctctctggccagtcaatgctgccagtcaatgcagtggcttacagaatcagtgagagaccatgtctcaaaaacagaaaaaacagtagagacgcatgatactaacctctaggactacacacacacacacacacacacacacacacacacacacacacacattcctgaatacgtatgtgcacaggcatgcacatacaaactactgaacaagtagacatgcataggcatgtgcatgcgcacgcacaaacacacacaccaaatgaaaaacattgtatgctgctgaattgagcactgcactccacatagtgcactccatatgctgtacatgttactttctgccttcctctgtagactctgttttccttacaactagggcgttttaaggaaacctggtatgtgacatattgctgatacttcatgacctcttactatgtggtggtttaaaacaaatggtacttgatgataccaacatagtcggtttatgaactttccaggcaaagtatggtaaacttacatgcagtgggtagaatgctagaggtcagatagggcttctctaggtattcttgtactgttttggtccccaggatggcaatatggaagtagtgaatatttttagacatgacctagtgggaggtgaccaggtctgaggagggattgatgcctttgtcatgggagtatatgtttcctctcacagggagctcctaagagagcaggtactcctattctttctccatggcgctgctggccactcttgaatgttctcccacaatttttatgcatctactgtgagactctccctagaagcaagcaaaagccaatcatactctaaagtgtcctgaaatgtgagctaaataaagctttttttaaaatcaagtactctgccttgtgtattttattatagcaacacagatggactaagaggacagtatttcttattcaataatatatcaacatgcaggcttcaaagggtttgaataacccttcaaattgttatatatttagttcttagtttgtttgtttcatttttctttttttcttagtgtaaagtacttttaattatattctcataaggattaacaactagggattgttttacattttttagcaatagaaagcctcccatagaatgtaaatggttttcagttggtaaattggtccttacaaagaaaaaaatccactcttacaaaatctagacctcaaaacaaaacaagacacaaaatttcggaccaaaagggcagagaattctacacaggtattgttttattttctagacttgtgggcaaagttccttaaaatgggagaaaattatatgtgttcaacaacagagaggaatgcatacacttgtgataatatagagccaagtaaatgattaagatgagttgtttaaaatggaatcaagattaagaaaaatgggatatttaaagacaagcatgacattctactcctgggaactcaattaaagaaccacttgtgtacatgcaccacaagccaaatgtcagattcggttgcaacattgttatagaagataaatagaaacagccatatggctgtcattataagaattgatagattgcagtctctttatagtctcatagaactctatgcagttgtgagagatgcatggataataactattaatcagcttgattagtatgtccaaaaacaacattgaggagaagaaaaaaaaaagcatgtcgtgggaaatgtaaatatagtataatttatcttataaaagagctaagaactgggaaataagatgtgttgtatagaagtatatgcgtatgaaaataaagtaatgagcagcacaaaagtgtaactttcgaaggaaataggagctgcaccaatggctgtgaaggtattagagttgctcatttcagaaaccacacatctatgtgttctcatgctgctcttcctactcatagggaattggtttcaggactctgagcatgtcaaaatctgcaggtgcttgtgtagtataatataacagatattgttatatatgaaacattgttgtctgagttggggtttctagtgctgcagcaaaacactatgaccaaaaagcaagttggggaggaaagggtttattcaggttacatttctacatttctgctcatcactgaggggagtcaggataggaactacaacaggagaggcaccgtgagacaggagttgatacagaggctatggaggggtgccgcttactggtttgctttccatagctttctcagcctgctttcttatagaaccaaggaccatcagccctaggatggaactacccacaatacactgggccctccccaatcaatcactaagaagatgccttacaactggatctcatggagacattttctcaattaaggttctctcctttcagataacagtgcatagtgaaattttttacaaattacacttgtatttatttatttgggttgaggatatatgctggtgtggtgtggtgtggtgtggtgtgttgtgttgtggtgtgtgtgggtgtaggttagagaacaatgtctgaaactcagttctcttcttaaacatgtggatctcagagtctcagagactaaccttaggtcattacacttggttgacaagtacctttccccactgagccatctcacttatagggaaaacttaacagagtcagtagataaacatgatttcatctgtgctggtttgaatgagaatgtctctcatatgctcatatatttgagtgttcgagtcccaattgatgcaactatttgagtaggattaggaggtgtggccctattgaaagaggtgtgtcggtttcaaaagctatcaggctcagtctctctctctctctctctttctctctctctctctctctctctctctctctctctctctctctctcccccctacattgccaatcaaatgttatctctcaactacttctgtaacagcatgcatgcctgcttgcttgcttgccacctaccatgaaggagcaggagaaatataggtgcaaaaggatagcggccccatgggagggctgcccagaagaaaccaggacatcaaagacaaaatataaatttagaaagaattaactcagggatatcaaagatgagtgtgctagccttggagaggtttggaagtgcccagtcattgacctagttaaggcatattaaaagataaaggttgcatgtgcatgtctttcattagtgaatccaggggtcttgggaggagggatgcagaggaggcacatgcacccaccaggagcatagaatggacttttaacagtttaccgctataattttatttatccaattgttttaaattggggagcaaagtttacataaaatcactcggtgtacaggaggatctgctcataggcacgaatagatctttcgggccagtattttaacatttgaatacatagcagcaccaggccaacccctgacatcatcttctgtttaaaaaatttgggttttgtctctggctttggaaaggcaaaaggaacaccctttggtaatcctaagaagcccattgtctactgtggagagctggtaagtgctgcgagcaatcgccattataagatggcgcgggcctccgctgtgcctaactagtaaacaagccttgtactcaggtgaattcactcctagtcactcccattctcggggtgtaatagtggggtgatgggcaagcaacgaatcgggagctgtcacgccatatcaggtgctgaaacgtcacgctgtgggttataaaagcagcgccattttcccggttcggggtcttcctgagaa

SEQ ID NO: 803 - DNA, 3263 bp, Mus musculus
agggcgggcagtgcgcgctccgcccagtcgctccctccgcgttgaggcccgcccgcggggccggccgcctgtcagagggaggtggcgatggtgctcttggtggcggcagcggcggcaacgctttccttggtcggacggcagggaggagaagatgactgaccgatcgactggatgaatgaatgaatggcggagccgagcgcgccatgaggagcctgccgagcctgggcggcctcgccctgttgtgctgcgcggccgccgcagccgcttccacagcctcggcagggaatgtcaccggtggcggcggggccgaggggcaggtggtcccgtcgcccagcccggggcttcgggaccaagccagcagccccttccctaagaccgcggctcccaccgcgcaggccccgcggaccggtcccccgcgcaccacagtccgcaaaaccggggctacaaccccgtcagccggctccccggagatcattcctcctcttcgcaccagcgcacaacccgctgccacccccttcccggctctggacctctcgcccgccaccccttcggaggacggacacactcccaccacggaatcaccaccctccagacccgcgcccaccacccttgcgagcacagttggccagccgccgaccacctctgtagtcaccaccgctcaggcttccagcactccagggaccccaactgccgagtccccggacagaagcagcaacagtagcggagtcccgcccaccgcacctgtcaccgaagcccctacttctcctcccccagagcatatgtgtaactgttctgaggttggaagtttggatgtaaagcgctgcaaccagaccacagggcagtgtgattgtcatgtgggttatcagggtcttcactgtgacacctgcaaagagggcttttacctgaatcacactgttggtctctgcctgccatgtcactgcagtccacatggagctgttagcatcctctgtaacagttctgggaattgccaatgcaaagtgggtgtcaccggctccatgtgtgacaaatgccaagatggacattatggctttggtaagacaggctgcttgccttgccagtgcaacaaccggtctgatagttgtgatgttcacacaggtgcttgtctaaactgccaggaaaatagtaaaggggaacactgtgaagaatgcaaagaaggattttatccgagtcctgatgccgcaaaacagtgccatcgctgcccgtgttccgcagtgacttctacaggcaattgcaccattgaatctggagagttggagcctacatgtgaccaatgtaaagatggttacacaggccagaactgcaataaatgtgaaaatggctattacaattctgacagcatctgcacacagtgcgaatgtcatggccatgtggacccaattaaaactccaaagatttgcaagcctgagagtggtgagtgcatcaactgccttcataacaccactgggttctggtgcgagaaatgcctagaaggctatgttcgagatcttcagagaaactgcatcaagcaagaagttattgttccaactcctgaaggttctaccattttggtttccaatgcctctttgaccacatcagtgcccacccctgttataaatagtacttttgcccccacaaccctgcagactatctttgcagtaagctcttctgaaaacagcacctcagctcttgctgatgtatcatggacccagtttaacatcatcattttgacagtcatcatcattgtggtagtgctgctaatgggatttgtaggagctgtgtacatgtaccgagagtaccaaaatcggaaactcaatgctcccttttggaccatcgagctgaaagaagacaatatcagtttcagcagctaccatgacagcatccccaatgcagatgtgtcgggattgttagaggacgatgccaatgaagtggctcccaatgggcagctgaccctgacaacacctattcataactacaaagcctgagaagctgagttgtcctcctggattgtcagaaaacagtgctcacttaaacagcacctgacctctggctgcacagagcctaggtagagtttgttgagaaaggtattgtgcaaatgttcaggtacaaactgtagtgcgcttagcctgtctgttgctcttaattcccccatgaagatctgaagcactcatcatcgaggacttgaagtaaagtatatttttgtagcaaaccacatgtatatatggaaaggctgaatcccacagagcagcctaagtctacctggcctctcaaaggactgctcggaaagtgttcacctcaccagatgtgatagaatgttgatgtggaggggaaagactgatggaagaattcatctccactttggaaacatattttataaaagagaggcagggattgtgttcattttactgtactaagagatgtaacttaggaagagatgatatctaggctaataaaaaaaatcttggttgtgtgtagactaagaaaggtgccaagaagttctgtagaagggcttggctttccttctaagagtctccttcaaaaatggagttaaagcacaggataagcttccatggtgagggtaggcacagcaggcagagagcagaaagctgatggtctcctcaaagaggttcctgcctctaaagaaacaaggtgtacataattaatgtagcattatctggtcaacattgtacttgtatctatttgtaaaaaatcatgtcctattttatcatctagactttatctgtatagcagttaatggtgttgtaaaaagaagatatgggaacttggttaaaatactgtaaaataggtgacaatattgctagagctgggactctggtgagcatcagtcattttagtccctatttggacactgttgaaattgataagaggtcaaatgtttctaatctttcctctctcaacctagagtcatatgctctttgacttaccatagattcaagcaatagattttgaagtctgcaattgcgaaactggaacacaggctgcattctccagacacacctaattagccactctgttttacactgctcagtgtaaactcctcaggaaaagacttctttcctgaatgtaaaagacagtcttccaaaggacagaaaatttaaattaaaaagaaaagccatcacatcacttcggggttcttgtttttatgcccataaaatatttatgtgcctcccatatctgccaaaataaaggcctctgacatttgagcataacctgtcacccatgcaccatgaggactgtttggcttc

SEQ ID NO: 804 - protein, 598 aa, Mus musculus
MNGGAERAMRSLPSLGGLALLCCAAAAAASTASAGNVTGGGGAEGQVVPSPSPGLRDQASSPFPKTAAPTAQAPRTGPPRTTVRKTGATTPSAGSPEIIPPLRTSAQPAATPFPALDLSPATPSEDGHTPTTESPPSRPAPTTLASTVGQPPTTSVVTTAQASSTPGTPTAESPDRSSNSSGVPPTAPVTEAPTSPPPEHMCNCSEVGSLDVKRCNQTTGQCDCHVGYQGLHCDTCKEGFYLNHTVGLCLPCHCSPHGAVSILCNSSGNCQCKVGVTGSMCDKCQDGHYGFGKTGCLPCQCNNRSDSCDVHTGACLNCQENSKGEHCEECKEGFYPSPDAAKQCHRCPCSAVTSTGNCTIESGELEPTCDQCKDGYTGQNCNKCENGYYNSDSICTQCECHGHVDPIKTPKICKPESGECINCLHNTTGFWCEKCLEGYVRDLQRNCIKQEVIVPTPEGSTILVSNASLTTSVPTPVINSTFAPTTLQTIFAVSSSENSTSADVSWTQFNIIILTVIIIVVVLLMGFVGAVYMYREYQNRKLNAPFWTIELKEDNISFSSYHDSIPNADVSGLLEDDANEVAPNGQLTLTTPIHNYKA

SEQ ID NO: 805 - DNA, 133642 bp, Homo sapiens
cggacaagtcatttgactactttgagtgacaacatactggcttgcaaagtgggggtaatcactctttctacttcacagataaggctaaaaagattaaaaggggaatgcacagtggttcaagcctgaaatcccaacactttgggaggctgaggggaagattgcttgagaccaggagttgaagaccagcctgggcaacatagcaagaccccaactctacaaaaaaattttaaaaggtaatgtgcacctgtagtcccagctactcgggagtttgaggcaggaggatcacttaagcctaggagtttgaggctgcagtgagctatgattatgtcactgcaattaagcttgggtgacagagcaagtccctgtttttgttttgttttgtgtttgctttttaattaagaggcacaatgtatgtgaagtgtttagaattgattcctgacacataataagtattcagtaaatgttaagtctccatcattgttgttattgttgttgttactatcaacgtctttcctccagagttgttgccaagttcacatgagatgatgcctgggaaagctctgtgctgtgcacctgtcagtaatcccctttattacaatgatagcaacctaagggatagagttatttgtgaaggtctaaccctattcctcccccaaatggttcaaattctttgtattgcagccaacactgatgacgagtgagggtttgacttggtgcccactgtgaatgacgtccttcagtagatctccaagaactgcagcaaatgcttttctgggcttattttagcatcagagggcctttgaagcaggatttcaacatttagcttcattgtttggggatggtgccttgcatttaatgtaggtttacaacttgagccttccttcctctcatcatcttgagataccatgaaggcaggtcagggatgtggttggcagagacatatcttcagattcaaatgaattctgttgttgattgttattgattttgagagtaataagtgctcactattaaaaaaactggaaaatgtagaaaactatgaaggagaaaaaagttaaatatccataatgcagtcactcagaaaaaaagaatgttaacattttggtgtatttccttttggtattttattctctgcacatattatcatttacacaatttgggaatcatggcataaatagttatattaatgattttttccacaattttataagaatttccttcataagtatcttttttttttttttttttttttttttttgagacagggtctcactctgtcacccaggctggagtgcagtggcaccatctccactcactgcaacctccacctcccgggtttaagtgattcttccacctcagcctctagagtagctcaaactacaggtgcaacgacgatgccaggcaaatttttctgtatttttggtagagatggggtttcaccattttgccaggctggtctcgaactcctgagctcaagcaatccacccgcctgggcctcccaaagtgtcaggattataggcatgagccactgtgcttgagtatcatctttttttttttttttttttttcaggcaccaagatttttatttacccaccttcctgctttcttttaacattaaaaccatattattctctttttgaaccagggttgtgataggaaccatcttgttacaaagtagtagcagatctatgcttgcttttatgtttttatagcccctctggctgtcacttctctgtcctttctcagttatccctttacagtctattctgacccctgtaaaacagggactaaaagtaccatcctcattgttatgaggtttaagagaaggcccagccctaagccaggctctcaggaaaattcaaacaacagttcctctttgcctttcaatatagctccttctcatctgtcatgggctggggaaccactgaacctgtaaaccacgggtataagtccacagaccaggaacacggtataagtccacagaccaggaaccttacctgaatggtaaggtacatgggctttgtgactccactaccaacttccaaactaaggaaggactgactgggcgccagtggctcatgcctgtaatcccagcactttgggaggccgaggcatgagggcaagagatcgagaccatcctggcccacatggtgaaaccccgtctctaccaaaaataccaaaaaaaaaaaaaaaaaaaaggaaggactgacttagtgagcagttccaagaccactcaactcatggttccttgtggatgcctcccttgtacctccatcatgaccagggcttgaggaggggcctctcaatttccccgccacacttgatatagtgttagggatgcagcagaggccaaaaactgagtgaccagccccatcgatgggggacactaaccaaccaatcacaaagttggtgccatttgctcttagggagaagaggcggggcctgagcaaggacagcagctggaaagtgaagggcaggcctgactctcagcagcagtagtgatccggcttgaaggggccatcacgggacgtgctcagctactgggcttgcttctcagttagcttggtcaatttcacgttcagcttgcccaggggggcgcctcagccactgcctcatccagcttcttgggcaggaagtgaaccccaatggggtacttgtctgggtgggtccacagcgcaatctgcaccatcacctggttgaaggagttactccccacaaagctggggcggcccatagcacagcccaggttgaccagccaaccctcagccagcacgatgatgtggcacccattcttcagccagtaccagtccgcctgggcttgatgtttgccttctccacagcattgttgttgaggcacctgacatcgatctccacgtcaaattgttcagtattacataagatggcatcatccttcatctgctcaaagtgccggccaaggatgatattgacacaggttgtggtggtgacaaagatgttgccctcctgacaggcctcgtccatggtggtcacctcatagccttccatggcagcctgcagtgcactgatggggtcagtctcggtgatgattacgcaggccccaaaaccctgcaaggcctgggcacagcccttgcccacatcaccatagcctgctaccactgctaccttgctggcaatcatcacgtcttggtccacttggtgtcatctataagggactcctggcagccatagaggttgtcaaattttgctcttggtgacggagtcattgacgttgatggtaggcaccttcaggattgcactggccatcatcttgtgtaggttgtggaccccggttttggtctcctcagagatgcctcagatgcccgacatgagctgtgggtacgtacttggtgtggatgaggttggtaaggtcacccccatcatccagaatcatgttgaggggcccgtccttgaagtacagtgtctgttcaatgcaccacgggtacccctctttcattttgcccttccaggtgaacactggcatgccagcctcggcaaagacagccactgcatgttcctgggtggagaagatgctgcagctagaccactgctcctgaacacccagggagaaaagggtctcaatgaggatggccgtctccacagttatttgcaggcagtcagcaatgcaggcacccttcagtggcctggaggccgagtaaagctcctgcatgcccatcaaacccggcatccattctccacaatgtctagggccttgtgtccccaggtggccaggccgatgtcagcaactttgtagggcagtttgtcagacatgctggcggcacctttgatggacaagggcaaagggggctgggccatagtctggggacaggcactgggtgggcagtgttgggcaggcagtgctaggcaggtgagtatcattttttatagatgtatagtgtttctacatagaaacatcatacagcacaaagtactcaactaatcctttgttaactgtttagatttttctaatttttgtaattatataacactctggtgaacatttttgtacatacatatttacatctgattatttatttcctttggatagattcttttttttttctctttttgggacagggtcttactctgttgcccaggctggagtacagtggcatgatcatggctcactgcagcctcgacttcccaagctcaggtgatctcccacctcagcctcccaggtagctgggactacagctgcataccaccatgctaatttttagtaattttttttttttttttagtagagacggggtttcaccatgttgcccaggctggtcttgaactcctgggctcaagtgatctgcccacctaagcctcccaaagtgttgggatcacaggcatgatctcctgtgcctggcctttggctagattattaaaagtagaaataatgagccgggtgcagtggctcacgcctgtaatcccagcactttgggagcccgaggcaggcagatcacctgaggtcgggaattcgagaccagcctgaccaacatggagaaaccccatctctactaaaaataccaaatttgctgggcatggtggcacatgcctgtaatctcagctaattgagaggctgaggcaggagaatcgcttgaacccgggaggtagagagtgcggtgagccaagatcatgccattgccctccagcctgggcaaaaagagtgagactccgtctcaaaaaaaaaaaaaaaaagtggaaataatgggtcaaagagtataaacacttttaaggctttctggaaaggttgtatcactttatatttctatcaacagtgagagaccataacaagtattaccagtttgtaaaaatttttgccaaatcaataggttaaaaaaatggcaactccttatctcaacttgcaatgctttaattactcaagttgcatatgcagtatttcatattttttagtcatttgtattcctttctgtggcttgtctgttagtgtcctttgctgggccgactttgtgaacagtggccccagtaatcctacagttgtctgcagaagatgccaaaccttgcatttagccacatctgataggaggccagcctccagcaggattagaaatagtccatgtcagcattgctgtttcaatgaaaccagaaaggggaaaggtgtctgtgttttattggaatctgggagatgaagttattttgctgagcccctatgtatcatatcattataccttcttttctcactcccaaagcttctgttttcttaaatgcttttctagcagaagggttaaatttggtgcatgtgtgtcctttccttcagtatgtgttcactgacctcctagtatgtgcaacacatagcggccacattaacgactgtagtgtatagagaagagcctgggcttttgagtcacaagggccttgggcaagtcccttaagctcttggaggctcagtttcttcttctttgaagtgcagatgacagccctgtctttgaggaataaacgtgttccgaatataaaactcccggaacagcatctgccacatcataagacttcacagacaatttttttaaaaaattttttcaagatggagtcttgctctgtcgcccaggctggagtgcagtggcacgatctcggctcactgcaacctctgcttcccaggttcaagcaattctcctgcctcagcctcccaagtagctgggattacaggcgtccgccaccacgcctggctaacttttttgtatttttagtagaaacgggatttcaccatgttggccaggctagtcttgaattcctgaccttgtgatccacccacctcggcctcccaaagtgctatgattacaggcataagccaccgtgcctggctcacagacaattcttgagccatttctgtgtatttgacactgtgctcggtgctgactaataaagtgagaaatcagttggggccctttagagcacctcatttgcctaggagaaaagtcaggctgcacattggctccaacaaggcccactctgacccctgctgttctgtggtccttccctaagcctttggctccaggtctcatgggccttagctacagttctggggcaaataggaaaagtgccagtcaatgttctgttacacagagtgtcacagctataatttttattttttcttttcttcttaccattatgaggattttccatttatagttaagggtgtcagtgggagccagccagcctcagtttgatttctagctctattatttactaagtgaccatgggcaagttgcttaacctgtgacctagtttccttagctgtaaaatgcagataataatagactatagactgaatgtttgtgtccccctaaaattcacacgttgaaatcctaactccccatgtaaaagtatttggaagcgtttgggagatgattaggttataagggcagcgccatcatgaatggaattagtgtccttttaaaggacacccagggagctcactgaatctgctggtgccttgatcttggacttcccaggcaccagagctgggagagatatattttttgttgtctacaagccacaatctacagtactttgttgcagcagcccaaatggactaagacataatagtacctatttcctggggtttttaggattaaacaaaacaattcatatgtagctcttggtatagtgtctagcatagactatgagctcaattatttactattaatatttgctatactgtcttcatagctacacttacaatgactttctaggattaaatttaacaggtataataatacctttctttgatgacagatatgtaaggtatttccaatttttaaacacaaacataattcctaagaaagtcatcttgtagtttagagattaaggaagatttaagattaaggaaatttaaaaattaaatgttgaatggacattaacacatttaaattactggtatctttcaaaaaaattcaatattttctatacatatgacaggctaatatcccatcttaaaagccccggcatggatgatccttgcctaaggcagagagctgacctgaatcactcgacaaggtctcctagtcatttgctctgtggctctcctggccaagaagctgcatcagcttttttccccttgccagagaacctctgatacagcaaagctcagggccaacccagcatttttcagatatcatttggaaatatcaggtagggcaagtgtcaggccatgtcacctgatggggaacttatggggcaggggtttctgctctggtccttcagccaacaagtctcaaagttagcaatggtataacaaaaatatgaacctacacagcttgagcaccgtctgtgtgctaggctctgtaaaaacattctcctcaatcctagtcaacaaatgagagactatttattggccccatttaatagatgagaaaagtggcctggcgcggcggctcatgtctgtaatcccagcactttgggaggtctaggccggaggataacttgagctcaggagttcgagaccagcctggccaacatggtgaaaccccgtctgtactaaaaatacaagaattaactgggcctagtggcaagtgcctgtaatcccggctactcgggaggctgaggcaggagaatcgattgaacctgggaggcggaggttgcagtgagccaagatcaccccactgcactccagcctgggcgacaagggtgaaacactgtctcaaaaaaaaaaaagtgggggggaaaactgaggctcagagaggtgaaaggtttcctccaaggtcacagagttggcagtcatgacccaagtctgtctgactctaaagacacaagctcctcccacaagcacgacaagacctcaattaattcaatttaaccagcatgggttggcacttacatgtgttgcccctgctaggttctcagaacagggagaacatctgacgtaagagacagacacataaataacaagttctagtattaaggctgatgcatgcctatgagaagtaataaagccatgtgggcaatacaatttatcctgttgtatatatttctgaaagccatccttaatccttttaggaagaggcaacggagaggtagattggtagatcagggctgtaatcaatgcataaacaaggggtggtggggaaatgagaagggagagattaattcccactcaaatccaggaatgtcttttagagaatgtgacattttggttggggtttgaagggccagggagggtcagcaagggaatatgggggactggcatgacctgtccaccctcccaaagcaaagtaaaaatagaaccttggttagtgcttgctaaatattggtcctgaagacagaacactcacattctccctcattcccgctgtcttatatacatagacctatcaagacacacccatagataaccacaaatgcaaaaacacagaaaatacacaaaaacacacaccagtacacatgcacagattattaagacacaatatatgaaaatagatactagctcccatactcataaactcacacagatacatacaacactcatacacacagactcacaaacatgtttatgcattcatacacagcctcccccacccactactcatgcaggaaaataaatgcatgctttaattaacatacacgggttcacacataaatctcatcctgctggtctggttgaagaccaatgactaatgggaaaccatgcacaaagccaaacatcacgtaggggaggccgggattgggttagcagtggggcttgaattaagccccatcagatgacaaacccgccctgcctggcttcctctggaagctgctgagccgaagcagcagcgcctgacctagctctggatcctgggcggatgatgcgaggctgcgtgcccgaattccagcttgattcagggtttagtgtcatccagggtcaagctcggctattagccccaccccaacccctgcaaccagccggaggctctgggggcactgaagggctgtggcctggggctgctttctaatcctgggcttgccctggcgcaaatgctgagaatagttagcattaatgagggttacaacagtgggccaggctctgggctaagccctttacgtccatgacttaattctcacaacagctctgtgaggggggtggggggtgaggggtgtcctatcatctccattttagtggtgaaaaaaccgcgctcaggccacaaaaccattcagcaaaagacatcaagttgaggttcaaccctgtctgatcctattcttcccggggtttaggtaagtgtgcttgcgagcctgtctcctccacgcaggaagcttgcaccttctgccctcaggggtctccaccgcccggtcccgcccccttgtccagtctggcacaacacctggcccacagcaggtttctggtgagggcgtgggtctcggttcagggaggccctcagcaagggcctcagcttccccatctctgaaatgggaatggcggcagagacctcgcaaggctgcgaccaggctctctggagcagcagagggcatgccaagctctacatcgtcgctgccgctgccctctcccatcgcggggttcccgcgcggtccccgcccgagctggggtgcggcgctggcgccccattgttcaggagggcggggatgctcccgagtgctgattccaccccccgctcgtgctcgcagcccggtggagcagatgactaggcccggcgtctgccgcgcggggcgcatcctttgtctgctccgcggcgcccggtgcccgaggcccgcgccccactctttgggcagacaaagccggggccgccgcgagcccggcgggctagagctgggctcgcaccacccttctctcgcctcacggaccgccccctctcctggacgtcctctgattggcctacggggctacaaagaggccgggaagcgggcggatcacgtgggcgactgtggcttcccattggttaggcgcggctgccaatcgaggagggcgggcggtccgcgctcggtccggtcgctccctccgcgctggggcccgcccgcggggccggccgcctgtcagagggaggtggcgatggtgcgcccggtggcggtggcggcggcggttgcggaggcttccttggtcggattgcaacgaggagaagatgactgaccaaccgactggctgaatgaatgaatggcggagccgagcgcgccatgaggagcctgccgagcctgggcggcctcgccctgttgtgctgcgccgccgccgccgccgccgccgccgtcgcctcagccgcctcggcggggaatgtcaccggtggcggcggggccgcggggcaggtggacgcgtcgccgggccccgggttgcggggcgagcccagccaccccttccctagggcgacggctcccacggcccaggccccgaggaccgggcccccgcgcgccaccgtccaccgacccctggctgcgacttctccagcccagtccccggagaccacccctctttgggcgactgctggaccctcttccaccacctttcaggcgccgctcggcccctcgccgaccacccctccggcggcggaacgcacttcgaccacctctcaggcgccgaccagacccgcgccgaccaccctttcgacgaccactggcccggcgccgaccacccctgtagcgaccaccgtaccggcgcccacgactccccggaccccgacccccgatctccccagcagcagcaacagcagcgtcctccccaccccacctgccaccgaggccccctcttcgcctcctccaggtgagtccggcgctccctctcgggcaggacccgtcctcacctcagccccggcaatctagggttgggctcttgcctataatttatcgtttgttaccccaaagacaccccaggttccggctcccgaggggggatcccaggtccagctagtctccctcccgcccccgatcaatctggaaagtcttttgtcccccgtgggctgtgctccctcgggagggggtggctgctgggtggaaggcatctcatcttcttcccaacagggctttctggcctttttcagagaccagaatgggcgcaaacttttgggttgggttcgcgcacccagcctctctgcctgggttatttggggaagtttgaaagcccgcatagtacctccttcaaccactgggtcaaaagctgagggtaaggaattcctcccaaagctccagtttccctgttcatttcttcttgtttatgtaaatatcagatgtgtgtgtatgacaggtggaagagaggtagtgagaggattttgtttacaaacagtagtatggaccacttgagggcaaaaaataaaaacaaaaaaggcattgtaatccatgttgtccctgcaaataagtggattcagtaggtcatttgggacaggtgtgtatctaggctgagcacatttacaaattaggttaaatctcttcctcgcaccatttttttcttccacaattataaggtcaacatgtttggccaaatacaccatttaagcaaggatgcctatttttgtctccttaagccaggatgttcaactttgctgatgctgatatatgccaatttctgtttgagcccacgtagaaaaggcttttcttgctgaagtcttcaagcaaagttaaagacaactcgtattctttccccgtttaaatcttaagtgggcctaggactaaaacaaaacaaaacaaaagcctactttgtcagaacgtttggacaaaagtttctgaattgtcttgctttgagttggggtggaggtttgtccaaatcctttgtctagctgggtctctgacctaaatcttaggcttagtgatttactgtggagtcaggtatggactttggactataattgagtgtgtagagaattttcccacatggttatgaaccttaatacagtcttgatccttgggttggagcttggcaatgacataagtaggattattcacccataaaaagccaagtgtgcatctcttccagcttcaaggaatgcattagctagctgggttttacctgtaaccccttttggctttcatatagagagattgacatattactgagagacaggaagcatagtggttgagagtatggactctggagtttattcttaggtttgaatcctagctcttccccttgttagctgtgtaagcttaggcggctcactgaagctctttggactcagtttctttgattgtgaaatgaagataatattatagtagtacttaactcataaggttgctgtgaagactttttttgtttttgtttttgttttttgagacagggtctggctctgttgcccaggctgaagtgcagtggcacaatcttggctcactgcaacctctgcctcccaggctcaagcgatcctcccacctcagcttcctgagcagctgagactacaggcgtgggtcaccacacccagctaattttttgtattttttgtagagatgagggctcactatattgcccaggctagtcttgagttcctgaactcaagcagtcctcctgcctcggcctcccaaagttctaggatttcaggcatgattcacttcaccaggcctgctgggaagattaaataagttaacacttactgtgcttacaacagttcctagtgtagaataagcaccgtgtgtgttagctatgcttatgaccaggcctgtgggtgtgtgtgtgtgtgtgtgtgtgtgtgtgtgtatgtatgtatagaaagcatttgagaaaactagtagggacttggggtgatttttatttgttttagtaaagtataatagaaaaagaatgaattagattctctggagttttaagcatacagtagcatttaagtagaaagatcacttactttggttagtatctgataaataaatctgtgtaattcatgttattttacttttactatttttgtgttgttatttttcaaccccaaaggtaacccctactggcaaaaaaatataaacaaccagaagtccacaaaggaaaaagggaaagtcactccttcactgcctcctagtttcagtcagtccctagaggttactactgttagcaatttgtcagatcttttttcagctgtttttgctgggcatatatgaacatacacacagggtatttaaaaatagattttaaaaaatcaaaatggaataattctatacatgttttgcaacttgtggtattcacttaactatgtatcatggacttttaaaaaaaatatcggtatctagggtctactttattctttttaatagttgcattttccagggtaagaatgtatcataatttatttaaccaagcccttatttatggacacttagattgcttctaggcttcactttaaaaagcagagaggaagcagcacagagtatttttgttaaatccatcatctatttactatattctctaatactttcactggagttgcttagaatccaattcagtatacactgcagtaaagctggattgagtaatatttgtcatctgaactgttgttcaaggcttttaataattttcatgaactaacattatacttacgtctgtgatggtctttgggtgaaaaaatcttggaaggatgtccaatttcgataactttcctgtgttttaaatattaggtagtttgtacttctctgtgaattcactctagattgccaatatctagttctcagcagctaaattgactttacagtgatctgatcaagtatggagcatgggctccagtctactttaaacagaaaacatatctctttggcagaaggaaaacttataattgaatttgagacaactggtttggcttgcaaagttggattccctggcatttgagaagatggttgtacagtattttttaatttcaacgttcctgtaagaactaatgccactgataatatattatttgattgaataggtcttatagatgctttttgaattaataataatttctttcatggagatctagctgagagctcttgcctgcccctcagttagggcccttttttgtttacaaggacactgatctgcaaactgaaactaattgcccagcaagcaggcactttttctcccacaaacccagcaaaacattcactgattggttggctgggtaggacttttttttttttttttttttttaagacggagtttcgctcttgttgcccaggctggagtgcaatggtgctatctcggctcaccacaacctccacctcccgggttcaagcgattctcctcagtcttccaagtagctgggattacaggcatgtgccaccatgcccagctaattttgtgtttttagtaaagacagtgtttctccatgttggtcaggctggtctcggattcccgacctcaggtgatctgtccaccttggcctcccaaagtactgtaattacaggtgtaagccaccgtgcctggccctgggtaggacattttaagcagggtgaagagagatgctgtgataccagaggtaataataatcagtaagacactaaggtaatgacaaatgtttgatttttttttttttttttttgagacggagtttcgctctttttgcccaggctagattggctcactgcaacctccacctccgggttcaagcgattctcttgcctcagcttcccaagtagctgggattacaggtgcgcaccaccatgcctggctaatttttgtatttttagtagagatggggtttcaccatgttggccaggctggtctcgaacttctgacctcaggtaatctgcccaccgcggcctcccaaagtgctgggattataggtgtgagctgccgcacgctggcccaaatgtttgattttaaaaattatggacccttaggggtagataggactttaaatgccactacctcctaatgtggctctacatttgaagaaatatttccataggcttagctgaaatttcttactttagttaactgattgatctggctctgcccgttggggccatgcagaaaaagttggctgtctctgtgccatgacagctcttacaggttaggggacagggatcatgatccctctctgtcttggccaaataatttcagctccttcaactgatctttatgtgacatggtttcaaattttcttactgtcttggttacttctcttctagtttttttttgttttttgtttttttttttgagatggagttccactctgttgcccaggctggaatgcagtggcaccatctcagcccactgcaacctccgcctcgtggtttcaggcaattctgcctcagcctcctgcctagctggaattatggtgcatgccaccacaccctgctactttttgtatttttagtacagacagggtttcaccatgttggccaggctggtctcgaactcctgatctacccgcttcagcctccgaaagtgctgggattacaggcatgagccactgtgcctggccctcttctagtctttttcagtctttctgtgtctaccaaaatgtgaaacagagctgaacataatactccagatgtgctctaaccagcttgtagcagagagggcagttgcctcattccttctggatggggtactgatgttgatgtggttagttcctaatcacagtagctttttggcagccgcattatgttgttgactcattgagcccattaagattgctaagctctattaaaatttatttatttttaaatatgtgctaggtgagtcttctttcattctggacttggaaattcttataattttctaaagtgtaatctgagacattaactaaatttataagattgattgtgttaaattcagttatccttttagatcccaggtttgtcagtgtactccacccagtttatttgcatttacctgcggtgtgttcctatagacagagtctacggacaagttagggcagattattcttacctcatagggcagaataaatttacagatgataaaacaatttggaagataaaggataataatttagattagttttaaagggtctctttcagctctaaagttctgtgatgatttggtctgcatgattcaaggcatatttatgtcccccaaagaaccttaattatttatttgttatctgagtgatgagaatagactttgtttaagcaagccctagaatttagaacttgaaaactctgactaccatgacatgtaaacaaaatattacagatggattatttatttttgtttgtttgttttgttttgttttgtttttggagacggagttttgctctgttgccaggctggagtgcagtggtgccatctcggatcactacaacctccacctccccggttcaagtgattctcctgcctcagcctcccgagtaactgggactacaggcgcatgccgccacgcccagctaatttatttttctttgtattttagaagaaacagggtttcaccatgttgcccaggctagtctcaaactcccaacctcaggcaatccgcccacctcggcctcccaaagtgctaggattacaggcatgagctaccatgcccagcctgtttttgtttgtttgtttgtttgtttgtttgagacagagtctcacttagttgcccaggctggagtgcagtggcaccgtctgggctcactgcaacctccgcctcccaagttcaagcagttctcctgcttcagcctccctagtagctgggactacaggcatgcgcaaccatacccagctaactttcttgtatttttagtagagatggggtttcaccatgttggtcaggctggtcttgaactcctgacctcaaatgatctgcctgcctcagcttcccaaagtgctgggattacaggtgtgagccaccacgcccagccaagatggattatatttgaaaagaacatcctaggaatataggactctcttaactgtactggaaaatgttttcatcatcctaatattctctaatactagattcaggatcttacttactcgtgtttctttaagaagatgccatttattttaaggaaatacaaactgtctaggcttcaaagttaatatagaccccacagtcttttatctaaaacctctgggttggatgtgtttcagaatttagattttttcattttttcataaatacattccagtgaattgggagcagcatcctgtaatcaaacacattaagatatctgcagcaaactgcacgtatctttacagtgagtgtgataaataaagactttcagtagcctttgctcaggtcaggttttatttgcatttgctcaggtcaggttttgttgccaaatgtattcggagtaggtcagatatttgccaccaagtgagttacaggaaaatttgtagtttcatagcttctggtattgagcatcagatttgagggattgtggactactataatagtaattacaagcacacttactatgttcctggcactgttctatgtgccttatatatattaagtcatttaatctccaaaacaggaactactaagttagttactattattatcctcattttatagataaggaaattgagttccatagaagcccagctctggcagaacctacattcaaacctagtgggtctggctccagaatccatattattggcatttaaagaaatacagctacctagaagagtaggaaaccattttgctaaaaataattggtccttggatattaatctgggaaaacttctactcttccttggcgtttactgtcttcattccactgtgtgctattcattcatctcccagaattttcttttcttctttctgtttttttcttttgagacagggtctcactctgtgtcccaggctggagtgcggtggcacaatcatggctcactgcagcctcaacctcctgggctcaaatgattctctcacctcaatctccagagtagctgggactacaggtgtgcaccaccacgcctagctagtttttgtatttttagtagagttgggattttgccatgttgcccaggctagtctcgaactcctgaactcaagtaatccacccaccttggccttccaaagtactgggattacaggtgtgagacaccgtgcccagccacctccctgaattttctgtttgacaacgttttacaattgttatattaaattatagctcttattgtttcattaattaggttctaagtttttctgtgatggagagatttgttcatattttttggggggccaggccccccaaatttatcataccttatgcctgacctaagtgcctaggtttttgtagaaattccttagtctgattagtttctggagcagcataaactccagaacattagtttcaaatcttctgtattatgtccccaggaagcctcctggctagttgaaaatttacacattgaaataatctaggtctttttatcttgatttttaaaaaagacccctaaaatttaagtgtgcataatttctcatcttagcatttctaaacatgtgtattaacttccagacattctggcacccttataaaaagaatagaagaaaagtattgcagtgctgtttttactgatgagtaaattatgggtggagagaattctgctctagggtacttaatagagcagaagaaaataaaaatgtaagaccttgtttagctgaaagacagtgttagatgatattttaagttataaatagctttaatccttgctttttcctttatcttgatttttgtgtggttttttttaggtgtgatataaaaatccttattagtaatgttgacattatattacagggacctcttctgtgatcacttaggctttttttcaagtatacattttgatttatctgtttttcactagaaatgactaccctgactgccctggtaactttaaaggaggatttctaaaaatgtgatgaagaagataaagattatgtctggatacctaggtttgaatcatagtaaaggtttactaaaaatatttatccttttagatgtatccatgtgagtacatgtgataaatttgtatcaaaataatctctctaataatgccactgttctacagataattatggtcagaaaaatctttccctattattttgtcttcattgaaaaaaaaaaaaacctttcttccattctccttgctcattttttttcaatttaaagccttctatgcgttcctctcactcatatcttttatttttagccccaaccattctttccatgatctttaaggaaccaaattaccctctctgtttaacaatttaccactttgtcctccttcagtgcttcctcaaagcttaattcttccaagacgtctttctagatgaacaaaaagtccttaaagatgtgttagtgtcagcatgcatggcgttgaacagtttgcactgagaacaaaatctgtctttctctgtgactttcacttttttcctattgatttgtttttggtctatgtaatttagattatgaagccttcttaatatgaaaatgtcatcctttatacaatattcagaatgcggtattctctctttttgaaaaaaaatggagaaaagattttctttttccactggggtcttctttattgtccaacttatgccccacctaccccctgccaccttcttctgaggaacaataaagaaaaaactttcataatagaagttatctggctctaaaaaaaaatcaagaactttgaataagtagcaaatttattttcctatttatgaataacatgacctgtttttgttggtaggtggttttgagatgcataccagtatataattaatttcgttaagaaacaaatgtttgatcttttgaatgacagaatttccccattagaaatataattaaagttaatagtgaacagagtgcttttaatattagcaattaacaagtgtgcagtgcattatggcttacaaggtgctcttagaatgtctaagaccttgcaattcacattttgttgatttctgcatattatatgaatgaaaaaggcttatgtcctctgtacttttattggtgaatattgatcaaacctttataggttttgttgggtttcagatttgatattttgtattttaaaccattgtcttttaagtttattttgttaagtgtaaatcttgtcttgtttagctgcccatatttatatgatgaataaatggtatttggagaagaggactgtttgctttatattttctttcctagacactatacagggctgaatgttgtggaaagagcccagaagtaactgaaagtaaatggtcatggagataacaaggtgaatcacagaacttgactgtgagggctcatgtgaatttcatctcttttttttttttttgagacacagtctcgctctgtcgcccaggctgggatgcagtggcggattctcagctcactgcaacctctgcctcataggttctagcagttctcctgcctcagcctcccgagtagctgggattacaggtgcctgccaccatgcccagctaatttttatatttttagaagaggtggggttttgccatgttggccaggttggtcttgaacttctgacctcaagtgatccgcccgccttggcctcccaaagtgctgggattacaggtgtgagccaccgcgcccaacctcaatttcatttcttcgtattgaaatatttacttctttcctagtgtaagaatctctttggcattatcttttttttttttgagatagagtctcactctgtctcccaggctggagtgcagtggtgccatcttggctcactgcaacctctgcctcttaggttgaagtgattctcctgcctcagcctcccaagtagctgggattacaggcacccaccaccacacccagctaatttttgtattttcagtagagacagggtttcaccatattggttaggctggtctcaacctcctgaccttaggtgatccacccgtctcagcctcccaaagtgctgggattacaggcatgagccactgcacctggcccagaatctctttggaattatcttaacctgctatttcagttgtactacttcaaatcattgttttaatagcaaagagacttacactgttacctttcatttttaatctgatatttaacactttggcagggaaggtaactaatattaactgagcacatattatatgcctgattacctataaggatttttttacgtacatcgtgtcatttaattcttaaacaatgcagtagttaaatcttattaaccttactttatgactggcaaacactgggattcagaaagttaaagtagtttgctcaagcctgtcaggcttacagactccatgagggcaggacttccatttgttttgttcacagttatacctctgctgtccagcccagatagattcttaataaatatttagtgattgaattagtgaaaaagaaggaacagtttgtaggtatactagacatgcattgtattcttgaggaaaataatgtaatcatgcctttctttttagtttagaaatcaatgtttctctcactcatagtaatatgaggaatagtttgagaacctgcttaggacaagtggaactccttgagatccagcttattatattaatgattcattttttgtttgtaacattttcccttgtatttttcttaaaggaagaacaacaatggacaaatgaacatttgatgacttttgtagaaagggtagctaagttgcagaagctgagcacttgtctgtaagatgtgggatcctaagttctttcattagttcttttactagttatctgtctagtaaaagcaagtagttttatctgttaaatgagttagactagatttgtgatttttaaacagtattatttggggacccagggttcctcagatgtgtttgggagccattatagggactggagaggccaacaggtctacttctggacctttcacacccaactctcacctctcacctccacatcaccacccccacttacatcagctcttctttcatttggcttatattttggatttgtcctttcagtaaagatttttgaaagaggaattctcctactctaacattttatgataaagaaatttggtaatttatgaacttacattaaaatgtttacattatattaagcagcaatatacatatgaggagagaaatataccaaaatattaattagctaaacctaagtaatgggattatgggtaattttaattaccttctttgtgtttttctgaatttttaaagttttttcgtgactatatccaattctaattttatagtcttaaaaataaatgaataacatttaaaaatgaataaaaagttctgataagcttggtaagtctttacttatataagatcaagtcagatgatattacccagggccacttaactataatttctgtcattgactaagcaagtttgatctatatcagggtatttgtttagtctaagtgagtcagggttttgaataaaggagactattcatgcagactgacaaatcttgaacatacagtaggaatgacatatctaagatttggtacctttaggcaaaatttaactgagaccttcagcagaggctgaaaattgagagctggctctttctccatttcattttgtctaggtaatttttttaattaattaattttttatttttttttttagagacagagtcttgctctgtcgcctaggctggagagcagtggcgtgatctcggctcactgcaagctccgcctcccgggttcacgctattcgcctgcctcagcctcccaagtagctgggactacaggcgccggccaccacacctggctaatttttgtatttttagtagagacggggtttcagcatattagccaggatggtctcgatctcctgacctcgtgatccgcccgccttggcctcccaaagtgctaggattacaggcgtgagccactgctccccaccttgtctaggtaatttaaagcattcacttgaacattacttaaagtagcttattgaaatagatcttgtttagattgtgcaaaatttgaattcatggcattgttcatagtctttatcaatatatttgattatttcttctttaaagttactgagcctccaaaagtttggtttcagtctgtccatatgttttccaattagatcagacgggattgctgttatactggtaatataacagctgttctatatgataccttgccagggagacagctaagcattaagggaagggaaaatttattcatttggaaaaaggaatacattctgcctagtcatagggaaaaagataaggagtaggaatgttgtcagcctggctggagaatgttaaataacctttatttactaaattttagaccctttagataactgagtctgaaaacttatttcagtcttacatgcttccaagaaactggcatattatcacagatcttattagatttttatcatttatttttaataatctagtgcttttacttgatacatgtgagcaaaaagaagagatgagaagtagtagcattgttaactacaaggaggatatcatatttcctactcctttttaattttggaaattgttttttttttttcttttttttgagacagggtcacactctgtcacccagcctggagtgcagtggcgtgattgtggctcacggtagccttgacctcccgggttcaaatgatccactcacctcagcctcccaagtagctgggactacaggcgtgcaccaccatgcccggctaattttttttaaactaattttttaaattaattattattattattattatttttggtagagacagggtttcaccacgttgtccaggctggtctcgaattcctgggctcaagccatctgcccacctcagcctcccaagtgttgagtttacaggcgtgagccaccgtgcctggcctggaaacggtctttaaagatgaaatttctttaaaaatattctaggaaaagtgtagatgttattcactctgaaggaaattggataacttgaatagatttttagattctcttaagtcctattaatcattatagggattgggaagggttattggaaataacggggggggaaggacttgcattccaatatatttatcctgttgtgtttgtttattgagtcttgatgagaggaaggcattgggctttttctgctgtagatttttcatgtgattttatatttattgtaatcctacagtgtgttttatcagttctatatgaatagcactaacattatagtcccaccatctattgatgttatgtgagttattgaatagttataaagtgtaccaaaaacccaaagcaatctagttgttgggtattattatactgaattgttggtgtattgcctgcaaacctatcctgttcaactggttttagtttttaagttagtttgttgcttcaacttgtccgcaaaggcagggctggatggtccagctaatcagtagaatcgaagtcagaagaactaaattctagtctttctattcactttttgagttattgagtatattttttgatgactctatgactcagtttcccagactataaaatgaaacttccagtcaccaaaggtttttgagaagtaacacatgtaaactactttgggctttctcagacataaaggctttaatattctttccaagttacatggtttatattagcttataatggaatgtgaccaagatagctttgattaaacacaacaaagaaataaacacattcatttatatatggcttctttacacaaaatatatttttatgctattttgtagttgacatatttgtataatttaacaattatggtgttttccaaaggtttgaggtcctttagtattatttttcttccccactaccttgagaaaacaaaataatctttatctcatattaaactcacaacatatataagttgtgctttatgtaatattatttttggttgatctgtttagaatgggttctacttacttttttttttttttttttttaagaaacacggtctcactctttcacccgggttagagtgcagtagtgtgattgtagctcactgcagcctcgaactcctgggctcaggtgatcctcccatatcagcctcctgagtagttgggactacaggcatgtgccaccatgctcagctaatttaaaaaaaaaaaaaattgtagacatgcagtctcgctatattgcccaggctgatactatactcctggcttcaaacaatcttcctatcgcagcctcacaaagtgttggcattacaggtgtgagccactgcacctggccagtttttttacaattataaaaataatctatgttcattttctacaataaacattgtagaaaatgaaaaatagagaaaaaagctgtcccataaagcttttttaaaatcactgattgagtttaatattttattactgcatatattgcttcatttctcatgataataaatgagatcacttgcttgttatgaaaacagaggtgcaagtaggatttaacagtcttctgaagaccaatataagacagatcaaaatgtgaaaaaattcaccacatttaaattatttatcatgtcaccaaaaagaaagtaaatctattttgatctaagaccccatatgatgctttacttgagacttggtactccctggcagaatcaagtcagtgactgtttttcttgtgtctgatccagcacaaacatgatttgtctttggttcacgtggcccctgaaagcccaaagcagcctggaacaaagccagacatttggtatttttcaatactgtgatgagagaagacaaggtgcccatctgcctggcttgtacgttgccaaaaggcctaggtgctaccctaaagaatatgccagagaatgactctggcctttaggaaactggtaatgattactcttctctgaattttgaactttgaaatccaagcagtaatgaatcatagtgttattgagaggggattaaattgatcaatgcatgtaaaacccttaattcagcagtgcttaatagtcagcacatacattaataatcagcacatagtaaacactcaaaacagtttttgaaaaacagggatttttcaaagacagcagtgagaactttgtctgttaattctggattaattaatttaccaacttccgtcatataatctgtagactggtaacacattggtaatcagaaagacttgcatattgtcacagatcaactctctaataggtggttctaaggtgcagggtagtaacaatatgcttgaggcaaaggctacctcctatccttccagaatggcccaggtcaagctagaattatcctgtgtcatgttgccagttacagcagtaatggtactgctcagaactggactaaatagaagacattttaaaaaggcaaatgcaaagatggaaatccccaaaacagccattgtccagttctggtgagtatatactccttgggatcttatgtaggccctagctacaaatgacctagtaaagtaaaaataaaattgggctcgtagaaagatgtgaccactctattttatgttggtagcacattgatatacacctattataacctattataacttatactttctaacattacatagttgcatacaggtgcaagtcacataatcttcctgggcttctatactatcttctgtaacatgagtataatagtaacctaccaaatagggttcttgggtgttgggcctggaattcaaaactagccctctgactcaaatctgtgccccttttttcctttgattaaactgtgctgcattgccaaagcagatgggagtagcagaaaatgaaataaagcatttagtagttacagagcacattttgggttctgtttttttttcacctcccctatcctcccccagcaaactcatacattttctgtctcagcactggttctgagatgtacacagtgatccaggttcgctttcagtagctactgtgaaaatcaaaattagatcaaagagtgtttcttgaaggcagatatgggtgtggagtggaggttgggagaggagataatggtggaaattaaatgagggtaagcaggtagaaaagcatggcaaatgtaaagcagaactgaatagtaactatgtgattgtctattcagcacaaagaggatcggtgctaacaagagacaatgtcatgcttattagcatttagcaagtaataccacatactgtgaaatggtagtattgattgtttttgacttgactataaaacctttcatctttaacttaatatggactctagaccaagatgctaatgcataacaatattttgtaaaaaaaaaaaaaaatagcagatgacgtttgattatataaaagtcatagaatagactgggcgcggtagctcacgcctgtaatcccagcactttgggaggctgagagggccagatcacttgagcccaggagtttgagacccgcctgggcaacatgatgaaagtccttctctacaaaaaatgcaaaaactagctgggtataatggcttgtgcctgtattcccagctacttgggaagctgaggtgggaggattgcttgtgcccaagaggcagaggttgcagtgagccaagctcatcccactgtactccagcctgggcgacagagcgagaccctgtctccaaaaaaagaaagaaaggtcatagagtatcagacttgcaaatgtgattcatactctgccagtcatttcagggtgcattccccttccttattttgtaaacttctctccttactcaaaggttagttatctctcagatcagacaaaggagcagctgttattcaactatagatccaactagattcgaatatgttttccaactagattacatcctacaggtacataagtacagtggtcagatcatactatacaactatagatgtggagaatacatatataaagtaaaacctcatcatatttgcctagttaatcatttaatatactatttatgtttcactataattctcctattactcactgttaaagtgagcccagcccatagagctcaagttctttggtatgatttaaaactccaagatgtctgccatcctcatttcttgtacttttccccttgtgctttaaactctagcagactgaaatggcttatattttccttcaaatactatgcttattttcattatcattattaataaagcaatcatctgtgaaggttactctttgtcagatactaagagcgttaaatgaatttccatgacctcatttaattatcaaaagaacctaataaaaagtttgtattattatccccactctaccaagcaggaattgaggttttgagagtttgaatacacaaagcagggtttcatagctagtacaatgtagaaccttgattcaaattcagatctgtttagctttagagctgcctctcctaatcactaagttaactagattctccttattttgcatgtgctgttccctctacctgggatgccctactcttcagtttcaataggggtcttaattctaagcaacagaaatcatttattgattcaatcaggattgaaatttattaaaaggatattgaggagttcacagaatctccagaggtaccaaattcaggccacggagttagaggtaatagtcagttgtgtccattgaatatatgccactgacatcaccactcacactgctaaccttgggtattggatgtaagaacaagtgctactgccacttgtcatactccatccatctccctgtttgccaccagagagagggcctcctgttcattcctttgaatcattagtttctaattccaagccaggtaaaggtgcatctgattgttggaacctcaatgactggcccatgccctggctgcaggggaggccagaaaaacaagaatctgacattatgaacctacgtgatgcggtatcaaggcttaaaatatggagaattcctccaaataggaagggattctgagaatggtgggaaattatactatgatactaggctgacaaaaagaatgacacgtgtctacccacaccctttctttggctacctgcaaacttatttgtcctttaaaaacatccttacagcctcctattatacttcctaacattacatagtttttgattatttgttttttttttttttttttttttttttgagatggggtctcacactgtcacccaggctggagtgcagtggtgtgatctgggctcactgcaacctccgcctcccagattcaagcgattctcctgccttagcctcccaagtagctggattacaggcacccaccaccactcccagctaattttttgtatttttagtagagacggggtttcaccattttggccaggctgctcttgaactcctgaccttgtgatttgcctgccttggcttcccaaagtgttgggattacaggcgtgagctaccgcgcctgaccttttgattacttgctttttaaggacccttattttaagtattacttgtctatgtaactgactcctctttaccttttctcaagtagcctataggctgtgtcttattgatgttggcactccctaacatgtacataggatagtgttcagcatgtagtaaatactaaataaatcattgaacagcattggtgcataaattgtccctattcaccaccagcactagaatgtaaggtccataagaggcaggggtttttgtctttgtctctctctctctctctttttttttttttttaaaccactatatggccagcacctagattaattcctagcatgtggtaggtctgtggtaaatatttgttaaataagtgaatacccctaaatagtaaattatttatctctgggagtgatgctgtcaaaaaggcctttgaatgtgaatgggaaattcaaagcaccatattataatatacaactagaccacaaacagtgaggacagaaactgccttattcatctttggttacctcttcttcctatctagaaacataaccagaaaagggcaatttgaaattttttcctagacctaccatgatagtcactagccacaaaaattgcctgaagtacctaccatacctgctaaacatgaaactttctttttggcctccttttgtgtataaccagctgtatcatgagattgcatctactctgggaagaaaaggctgttgggcaaactgtcttgtacttatgtttaaaaaagtagaataacctagggcagtagaatctcactttgaagaaatgaagaagtggaggcccataattatgaaatgattcgtataaatgtaaaacacttagaattcctggcataaattggccttctaaatattagctgtactttttattgcatattgaaaacttagtccttcggactttttacttcactgcttccaatccttttaaattcttcattacctctaatcctctcaattctgttgataagcagtgttacccaactttacaaataaagaacctgaatctaagatgaggttaagttgtttgcccaaaggtcacagccaagtgctagttagctgggattcaaacccagatctatcttatttcttaagctctttctaggatggcaaaatgacatgctaaatgtaggttgagtttaatgtgttctattatatccttctaaccactgttagttgtaatgcatcttttgcccctgccacctttgcttctcttttctgatttgtagtcattattttactgtccatatcatatatctgtttactactctcttcagtttttctcctgattctttggagtagaaagtatgcattttacccaaaagaaaaagtacatcctcacatactgctctgtccattttacttttacctttatttttttttttttagcctaattgatttgtacagtggattggtttccagaggagaagacttggatgtctgttatgagtcagatgagtaaagttatacattagccaggatgacatttaagggctaatagcctacatccccaaactaacagtcattttagccagtgtaaaacatgaaacacaagttggtcagaaatagagacaatagcaaataatggtattgagttgctacaaatgctttgcaacctagtaatgtacttttatatgtatcaattatttttaacttgtgaataatactgaaaaattccaaatggattccagacatttattgccaacaaaaatgtttacttaaacttgctgttttagagaattatttttcttagcatatggtctttcttgttaatagcaagccttttaacagtttatcagaatgtaagcatttctctttgctatacttcttttagttgatgatcttgtgtaatagagcactcatttagaaatacacacacttaaaatctgtgattaaatggtcttcagggactaaagccacaagcagcaggatgctgttgctttctgtttccttattgcttaaccaatctgcaatggtatcatcctctttttcctttttcttcttcttcttcttcttctttttttttttttttttttggttaaccagacaaaatttcaaatcctctttattttttcttgccatgctcaaattggtctttaacagtgcttcactaagatgcttctgtttgactttacattcacttttatttaagtaacaaagaaaagggtgtgcttttgtcaataagtttacactgggctttctgttatacaaaataaggttcttttacattcatcagatctttgttaatcacccactgtgcacctagctgggctagatagatactggaaagacaaataagacctggtttctgtcattgagaacatagcgaaggatatggaaaattagactacagaatggtaagttctatcatagtggtatgtactacagaagcaaagagaggactccttacccagacttttaggggatgaaggacaatgtcaggaaaggctttctgtgggatgttttctctcagtggagtcttgagaacaaataggaattattcaggtagaagaggggaaggacactctaggaaaagggagcagcagcctgttgaaaaagtacagaagtaagagagcacatacatggcccatttagggaactgaagtcctgagtggctcgagtaggggaggaaaaggtacatgaaggtggaacagggaatgaagagatttgtggctgggatggtccaaagttgtcaaatcatgatgtgctttccatgtcatgctcagaaattgattctaagagccatgaagaagtataagccaggaagtgacatggtgagatttgtgtttggaaagatcagtctagaaactgcaacatacttctataagtgtaaatgatcatcagagaagataattagagggcacttactgtctctttaaatcttttccatcattaattttggattaaatgctagataacataataatagagggtttatgaattagtttcctgtcttctgttattaagcaaacatttgaaacctattttacttgttggtataacacatagacttagataattaaaattagagacttgacaaagctaccaattggtgctggacctcttgatggatctgatgttaggttaaacaaacacaagtgccttctgtatgccaggcagtgtgctaggaactgaagagagaatggtgaatgacttaggcattcacaatctagtggagagacagattcatacacaaatgcaagtgctctagaatacttatgtattagattccttaatgtacattttcactttcagtccttaccttaaacttaaatatggatgaggaaaccgaagataagaagtatttaacttactcaagatcatgtaataatgagtggtacatagccacaattcagtattcgaagtacctaactcaatttattccgtaccatattatactgcttctcttgacaaggcaatgcatatgtacttttgagcctgaagtagttttcttcctctcttttcttaattctttctaatgctacccaaaccggtaatgttcagccttgaagtatccagtcattgttggttaaaagtgcaggctctgaagtcagattgtctggattccaatcccagctccatcacttactccctgtctgtcagcctacatcatagaattatgagatgatgttggtaaagcacttaaaacagtgaaagcacagggaaagaattcaattgatgttacttaaaattgtcattggaatagcaattcatctactttccaaacattcaggaaattttgataaaatgcgtttaaactatccaactttattgaagttaatcttggtgaagagcttttgcctagtgtgcatatttgaaatctgacttcttgttcagggcatcagtggcctgtggcaaagatgccccaaaagtatctaggaaaatatgcctgtgagagtaacgtaaagatacttaaaaacttttgtattgtggaaaattttgaatatataccaaaattaacagagtagggttatgacctttctcatatctctcacccacctgcacaaccaactatcactccatggccagtcctgcctcatccacacccctatccatttatgttgctagagctaaatctagagacttgattgattgattgatcattttttgagacaagtaatgaaaaatggtggctttttttgttgttatttctggcattgttaaatacctagtaactcaactgaggatgaaaactggcaacataaatactcctggaattgtttggatagggtaggatacagattattacccagtttctacatgtgaagaaactatgactcaaagaaatgcttatcaatggtcatattaactgcaaacaacttgtgctaaaatgtgtcattggaaccatgctcattccatacatatttattgagttcaataaaatatttatatttctttttaaatgtctgtggccaacattatttttataacaagggcatttttattttgattacctaatttcttcttttgttatgttagaatttaaagtacttccctcctcctctgtcctatcctaatttttagctagtggagtgactttagggataatacagaggaaattttggtctccagcagagggtcagttgcaactatgaaaacaactcaggcaaatggtctattgatagtggaacttttcattataaaaagttcttttcaaattccaggatattggttgcttggtcactgaagagtctgtactaccattcagtagcaccctgggtgtctgagcagacctggttaggaatgtactgctcattttgaatgaaataaataaaaaggatagagaagctgccccaagcattgccaaacattctacatctgatgtatcattgatacaaaacattagtcttttagagtataccctaaaatacaaatagttttcattttgaatgttgccatctttgactatagccacatatcctttaatatatacacacacacacactgactccagggcattgatgaaagttcattgctttcttggtctctgggtgagtaaagttgttttaatatgtcaggtttggttttgtcaacaaaataccccagtgtacttaccttctttattcccattctttaatttttatgtccttggacctcgtaatttccccaaagttttgtatgccattccctcagcagcagaagtaatagtgcttgatgaagtatgactttgatattagtttagttatatatctggaatgtttattcccctgggctttccaactgagggagcccagcgtgaactccttctttggaaaatatctgagtgggcagacccatttgccacattaccctcattgtctgtctttgtttattcagctgaaaagcaagtacttgcctcttacacagccagtcatgaatcttagagtctcagaagctgttaaaacgggtagaaaaattgttatgggaagggagaggatgaaaattgttatcaggtattgacataatgtgcaagtaaaggtgctgtcttagagaagagcataatgactttaggtggttataaagcacaactctggcaacatttttatgggcccaatttattagggtctttgatttttatacaattttcctaccttctgagtaagagacaatgataattcattggcacacatgattcatttttactacaataggggaaaaactaggtttttaggatatgagcctaccatctggtgcacaggtaatgataaatatcctgtggtcataataacatgcacatgctcttggcatttatttttctggctatcttcatctctcaattggattttttttagcaggctgctaaaaagtctctttgcattcattctttccctggtccattttcacactgtagccagaattatgtttctaagatgtagatctgattattcttcctctcttgtataaaattcttccatggctatccagttgctcttaggaaagtccttcacctgtcaccacttcttaccccattctgtgtcccagccacaatgcactttttccagttctctatagtactatgctctcttttgccttgatgttgttacacatgctgctccttgccttggggatactcctctcctctacccttagcttagctatacctcctcattcttcacgtccatgcttagatatttcttcctctagaaagtctgaattaggtggttctccatgtgcaaacacatgtaccataatgttctattcatatttctgtttcaatacttatcacacgatattgcttctttgtttttctctctgctataagacattaagctgtataagaacaatgaccacgtctgtctttctcattgttgtatctccagcacctagaaattgtagtctgtatttctggcacaacactagtttgttgatgattgaaccagtgattaatgtgctttgccaggaatcttttctctagaaacctcagagaagaattacagttctctggttttgtgctctgcatatttttctatcttctattcatactaattcaattatcaacagaacattgctttgaaccttttaaacctctctaccttgcccagaagcacgtgtaaagaacatgtaaaatgaaaaactcctgcatatacttaccatacgcttcctatgtccatcctatctaaaattgcactcccacaacacacatgtagttactctccacctccatctcccctgtctccctttcctgctgtttttcctccttaggatttaactaccttctaacatactaaatacttaacctatttaagtaactaattgtgtgtccatttctaagatgtaaggtccatgagggcgttaattttggcctgttttgtttactgccacatccctagcatctgaaataatgtttagcaggtatatatgaggcaatatatatttgctgaatgaatgaatatattcatgcccttggatgtatgtctttttctttttcacttgattttggtgcacctgatacagccctgctgttagcactactgtttcttttccttccttattttgcagactttacagttagtcctatttgggtccataatcttggctaccccaggcagagattctgtttttccatgttgattggcccaggtaaccatatcttcacttgaatctgaccttcaaatctcctaacttgatctctgaagccctaagagaagttgtgtgtgcgtgcgtgtgtgtgtgtgtgtgtgtgtgtgtgtgtgtgtgtgtgttgcggagaggagatgatgcattcagagataagtcagatgcaaaacttgttcttttaaaacctagataggacaaatagatgattatttctatagtacaagtttgagtacgatgatatttgtttatgagaaatgctaaccaatggggagaaacttattcttcattttaaaaaatatgaaataagttttctgaaaagtataaaaagtaatatagtgaacatcccctgtatacctgcctcccagctttgtaatatctgaattttctcctgtatttgctttggattgttttcatttttgagataaaatattaaatatgatcatagcctcctggtgttctttttttttttttttatctctttttctttcttccctacccagatgtaaccactatcctgaatttggtgccatgcatttaaaaatgtttacacacacacacacacacacacacacacacacacacacagtgttgtgttcatgtttcaaattttgtataatgaactcttaccatgctttttttaaactcaccattttattgagatttttctatattgttccatgtaattctgctttatcaagtttgctgtatagtttcctactgtatgaatagtccacaatatctcatttttcttattgataatcatttgagctgattctacattttttgctttttcaagtaatgctgcaatgaacaacattgcacatgttttcttcacttgtaggtgagtttctctagagcaatacgtctcaattaatgtgcataggaatcacctgagtaccttatgatactgcaggttctgattcaggtcctgattcagttgttctcaggtgggcctgagaatctatatttctcacaagttcccaggtaatgcagatccatagaccatatttggagttgcaaggcactgctaggttctagaatatgcacattcttctctgaagaggttatacaagtttatatttcaaccaggaatgtatgagagatttggctgttctaggagtagcctcttttagatgattctataaattttatgtgtaaccattctctccttaaaattagatattttttttggagggaaagcattaaaacatatagcagaatcacttcagtgggtagttggcttaatttcagcatttctcaggaattgatctaaatatatatatatacacatacacacacacacacacaaactattttattaaaaattcacctgtttcctttttgttcaaatagttactctgtttaccattgccaaccaagacagggctttgactacaaaatgaaccatcccagagagttgaaagggaaggaagactgtgtgccaagtactatgctatattgtttcatttaatatccacatttgtacaggggagggagctgaggctcacagcaaagtgttagagccagtgtttggattctagtccacctgactttaaagattggtgtactactcctagcttcagttatctgtaaaaaggaggtagtggtagagcagataatcagatctctaacttccagcactttaagattcactagcttctagttagggaagtaaggaatgcctaccagcatactgtatcatgatagctccctctctccttttcaaattatgggttaaaaaacatataaagctgaccactgtaaccatttttaagtgtacagtttgttaagtatattcacattgttgtgaaacagatttccagaactttttcatcttgcaaatttgaaactctgtatccattaaataagaattccctcggccgggcctggtggctcacgattgtaatcccagcacttcgggaggccgaggcaggcggatcacgaggttaggagattgagaccacagtgaaaccccgtctctactaaaaatacaaaaaattatccaggcgtggtggcgggcacctgtagtcccagctgctcagagaggctgaggctggagaatggcatgaacctgggaggcggagcttgcagtgagccgagatcacgctgctgcactccagcctaggcgacagagcaagactccatctcaaaaaaaaaaaaaaaaaaaattccctcaactcccttttccccttcccccaagctcttggcaactatcattccaatctgtttctgtgaatttgactactttagatacttcataagtggaatcatggagtatttgttgttttgtgactagtttatttcacttaacacagtgacctcaaggtttctccatgttgtagcatgtgacaggatttccttcatttttagggctgaataatattccattgtatatagatgccacattttctttctttatccatcaatagacatatgggttgcttccacctcttgagtattgtgaatagtgctgctatgaatgtgattgtgcaagtatctcttcgaggcattgcttttagttcttttggatataaacccattaatgagattgttgaatcatatatggtaaattaattttttgggaaactgcgatactgtttttcatagtggctgtaccattttacacttccaccaagactgtggtgatagcttttaatggtacagaaagtagtgaatgggatgtatgaaatcagaagtgaagtagaaagaattggcaaattctgctagtgtggaaatagatatcatttagccatagtctgtttcccttagatattttatctaacattgcctgtttctccaagactattacttcaggaggggaggagggagccaaattatttcttttttgatatattattgaccattggtctctgagaatatccgagattgttaacatctaatagtgccttggcaataattagaggaagttcgacggttgtgttttgtatttttctctgaaggagtgtgcaagagtatgatgttgatgtaaacattgtgatgagcaggttaggagtatgtcaggaacatggaatgcaatcctatgtctgtattgcttgcagccttgaacaaaatcttcaacatcttgatgcttccaaaatcgcatttaaaaaatgaagcctcccggccgggtgtggtggcttacgcctgtaatcccagcactttgggaggcccaggcgggtggatcacaaggtcaggagatcgagaccatcctggctaacacggtgaaatcctgtctctactaaaaatacaaaaaattagctgggcgtggtggtgggcgcctgtagtcccaactactcaggaagctgaggcaggagaatggcgtgaaccctgggaggtggagcttgcagtgagccgagatcgtgccactgcactccagactgggagagagagcgagactccgtctcaaaaaaaaaaaagaaaaaaaaatgaagcctccaatctgttttagtattgtgacttctcaacatcagttttcttttgaggatcttagtgtatacatggcgtatatgtgttggcagggaggtggctgagttccactaatggcgtgtgcaagagcaggaatgatcagtggtgttggaagagggatttcttctctactgtgcccttctttttgaatataaaatgttactcaaatgcttagtcacgatgataaagcaaagaatttcacagcttgcagtgtggagcagtgtttatactgtataagtgtttgataatagtgaagtgtggcaggagagtgggaagaatttgtcaacaagttttgaggattaagaggattagatagggaacacaaagtaagataaccccctttgacttctgaaagaaaaaagtagttattttaaaatgtcctttggaatgactcaaggctcagctattttacttgcttctagaaaactgcaaatctattaaacttctagcactgtagacaactgcagacaggtatattttcgaccttggagtgtttattcagaaagcaagcagacttaatttcagtgtataatatacagatagaccctacttactgtgccatctgtatgtttgaagaagcagcctttactagtgactctgcccaaattcaggttctcctgtcaaattgctacaacagtttgtcaataaacctgtagccctagtctaccttctctagtcctttcttcacactgctcttaaagatggtcatgaccatctgaccttgggaaaattaatttctctgtgcctctattttcttattttataccctctatggtaaaggttgtaactatcttataggttccttgtacatttttatttgtatttatacctggattttattttatttttaaatttttttccttgtaagttttttgtttgttttggggtttttttttgaagcagggtctcactcctgttgtccatgttggagtgcagtgatatgatcatggctcactgcagcctcaacttcccaggcttagatgatccttctgcctcagcctcctgagtagctgggactgcaggtgtgtgcccccacacctggctaattttttgtattttaagtagagacagagttttaccatgttgcccaggcttcacactgccagttttcaaactgctataaagaactacttgagactgggtaatttataaagaaatgaggtttaattgactcacagttccacatgcctggggaggcctcaggaaacttacaatcatggcagaagccgaaggagaagcaaagaccttcttcacatggcggcaggaaagagagctagcaagagcagggaaaactgccttataaaaccatcagatcttgtgagaactcactcactatcactagaagagcatgagggaaactgcccctgtgatccaatcacctcccatctggtccctccctcaacacatggagattatgaggattacaatttgagatgagatttgggtgggttcacagccaaaccatttcgttccctttggcttatggccaactttttgggtaaatcagaatgaattttgaactatgtaaaaatgcatattccttagtacccccaccagagatttctattcagtcggcctaggatgggacccaggaatcagtgtgttactgtactctccaggtgattttgaggctggtggtaccagaaccttctttggggaatcattccatgttggatgaaatgcagactctttagactgcagttcagggccctaatatacctttctaatatgtatattctcctattcctccctattagtctttgctgcaaccataacaagtacattttctctactcactcttctccatatgccccatgtattttcccaagatagtatggcataactttgtaagcaaatatatatttattcctagtaatctacaaaatattcatttaatactatgtgtaagggctgggtgcggtggctcatggctgtaatcccagcactttggaagctgaggtgggagcatcacttgggcccaggagtttgagaccagcctggttaacatagcaagatcctgtctctacaaaaaataaaaacattagctggggatggtggcttgctcctgtagtcccagctactcgggacgctgaggtaggaggatggcctgagcctgggtgatctacagtggaccataatcatgccactacactccagcttgggtggcagagaagaccctgtttcaaatatatgtgtgtgcgtgtgtgtgtgtgtgtgtaagaattggttggggatgaatgtgaaactacaaaatgtggaaccaaccttcccttttttgaatattggcaaatagttcctaggttataccactgcacaccttaggatagcatttttaaactgacctttccttttgttctctttgtactacttttctctgaatgaattttccaggcattacaatgagcaaatagttctaacctttaagttgctcatctggcctctctgtaaacagggacagtaaggcaaatctggtcccaacctcagaagcaattggcagtacttgaaattgaagttattttcttcttatgctttctgttatattacctataagattaagccttaatcaggcattaatgaattattttgggtattttgaattcattaataggcctctgatgatcccttttagtttttaatttttgcaatctgtagtaacatctaaggatgctactttgccaaacagattgcttataataaaaatgtagggtagagaaaggccactgtcataggtgttttttgttgttgttgcttgttgttgttgttttgccttgtatcttctaattctgaaaacatccttgtaaggttcattactctaattttaagaaaagtctttacaaagaggacatgacatttgagattgcagagctataaacaacggattcagatttgcacccaagtccctttacttcataaactaatcttcctctactgtggcctggagctggatttcaagttattcaaattcagtttccgtgtttgctctccctgtccctgcctccccttggacttgggatattgtgataatgctgtaaatcaaaaagcccatataaattgaagaatagttaccaacataacagctactctatattaataggtatatggtaattaggatagaatactcttaagccttctaggcagtacttggttaattattttagtattacacatactaaatttgatagtggcctgatagagtcaaatgcattctttttttttttcattaggcacataacccatttttattataaaaagaaatgcacatataagtaaacttgtcttgtgccatccctccgccaaccccaggcagtgcatctcgcagcaacaaaagtgactccttccttttgtttaaggagaggatgcaaagagtaaagcggactttgtcttgcatcttggatacaagctcagccacagtagtatagggtatcaagcagagctgtgaggcccccattccaggacctagctcccagacaacatttctagacacaccctgtgccaaaagggaatctgccgccttcaagggaaggacccagtcctggcggcattcatcacctactgactaaagagcccttgggccctgaataaccagcagcagtagccagggaggacactgtggggccgtgggctctgagatgtgctggcttcagaggcgacccagcacattcccagctgtggtggctatggtgaaagactccttctgtttgagaaaagcagagggaaaggtaaaggggactttggcaccttaagtaccagctcatctatggtaggatagagcaataaatgggctcttgaggtccctgactctagggagcctaggcctaggctcttaggcagcatttctggacctgcccttggccacaggggagcctgctgcctggaaaacagagtcccaggcctggcagcattcaccacaagctgatggaagagcccttgggccttaaatgaacatcgacagtggcctggcagaaccagtggtggtggtggccacaggaagaggctcctgtgcctgtggaaaggggggaagagtgagaaggactttgtattgtggcgcgagtgccagcttagccacagtagaatagaacatcaggtaaactgctaagactttttacttctatccctggctcccagacaacatctctggatacatccagggtctaggggagcttgccgccctgaagggaagggccttgggagagatccagtgctgtggtggcttcaggtctgacccagtgcagtcccagtggtggtggccacaggggtgcatgcgttaccacacccccagtttcaggtggctcagcacagggagagagacttcatttatttgggagatggtaagggtaaagaataagagtttctgcttggtaatccacagaattccagatcttatccaggaccaacaaggcggtacctgtataagtctgcaaaaaccagtgttactgcatttggggcccaagtcccttcgaatacctggaaagccttcccaagaaggagaggcacacacaagcccagactgtggagactacaataaatacctaactcttcaatgcctagacaccagtgaatatctacacgtatcaacaccatccaggaaaacatgacctcatcagatgaactaaataaggcaccagggaccaatcctggagaaacagaaatatatgaactttcaaacagagaattcaaaatagctgttttgaggaaactcaaattcaagataaaacagagaaggaagtcagaattctattagagacgtttaacagaaattgaaataagtaaaaataacagaaattctagagttggaagtgcaattgacatgctgaagaatgcatcagagtctctctctttttttttttttttttgagacggagtctcactctgtcacccaggctggagtgcagtggcacaatcttggctcactgcaacctccgcctcctgggttcaggtgattctcctgcctcagcctcctgagtagctgggattacaagtgcttgccaccacacccggctaatttttgtatttttagtagagacggggtttcactatgttggccaggctggtctcaaactcctggcctcaggtgatctgcctgcatcagcctcccatagtgctgggattacagacatgagccactgcgctggccagagtctctctgtctctctctctttttttttaaattatactttaagttctagggtacatgtgcacaacgatcaggtttgtcacatatgtatacatgtgccatgttggtgtggtgcacccattaactcgtcatttacattaagtatgtctcctaatgcaatcccttccccctcccccgacccctcaacaggccccggtgtgtgatgttccccatcctgtgtccaagtgttctcattgttcaattcccacatatgagtgagaacatgcggtgtttggttttctgtccttgtgatagtttgctcagaatgatggtttctagcttcatctgtgtccctacaaaggacatgaactcatcattttttatggctgcatagtattccatggtgtatatgtgccacattttcttaatccattctatcattgatggacatttaggttggttccaagtctttgctattgtgaatagtgccgcaaaaataaatgtgtgcatgtgtctttatagcagcatgatttataatcctttggttatatacccagtaatgagatggctgggtcaaatgatatttctagttctagatccttgaggaattgccacactgtcttctaaaatcgttgaactagtttacagtcccaccaacagtgtaaaagtgttcctatttctccacatcctctccagcacctgttgtttcctgactttttaatgatcgccattgtaactggtgtgagatggtatctcattgtggttttgatttgcatttctctgatggccagtgatgatgagccttttttcatgtgtctgttcagccagagtctcttaatagtagaattgattaagcagaagaactagtgaacatgaagacaggctatttaaaaatacaaagtcaggctgaatgcagtggctcacacctgtaatcccagcactttgggaggccgaggcaggtggatcacttcaggccaggagttcgagaccagcatggccaacatggcaaaaccccatctctactgaaatacaaaaaaattagccaggtatggtggtgcacacctgttatcccagctgttccggaggctgaggcatgagaattccttgaacccgggaggcagaggttgcagtgagccaagatcatgctactgcattccaccctgggcgacacagtgagactctgtctcagaaaaacaaacaaaaaaatcccccacaagtcagacagtaataaatgctggtgaggatgtggagaaagggaaatcttgtatagtgttggtgggagggtaaattagtacaaccactatggagaactgtttagaggttcctcagtaaactaaaattagagctacaatacaatccatcaatctcactgctggatatatactcaaaggaaatccatatatcgaggaatatttgcattcccatgtttgttgcagcaactgttcataatagccaagatttggaagcaacccaagtatccatcaacagactaatggataaagtaaatgtggtgcatatacacaatggagtactattcatccataaaacagaataagatcctgtcatttgcaacaacatggatttgcaacaacaacaactagaggtaattatgttaagtgaaataagccaggcacagaaagttaaatattgcatgttctcacttatttgtgggacctaaaagttaaaacaattgaactcatagagatagagaatagaaagatatttactagagtctgggaagagtagtcgggggttgcatggaagggaggtggggatggttaatgggtacaaaaaataaaatatactctcgaaacatgaacaattaactcttactaagtggcaaaattagttttttcaaaactttgaaaaatgtatactaatggaaaagtggtggcacaaaaagataagtgttttgcctaggttcaaatagaagtttgatagcttagtatagtccatatccagaactcttgatcccaaattagcacatttcttttagagagatacttgtattgttttagttatgagagtgcatttgaataaaataaatggatgacaaatactaactcatgattgtgtctttggctttgaacagtatgttaaggtgtaccagctgaaaacaaatgcaaggtgttgccaattgataatttattttgtagcttgagcaactgcttccctcctaccccacaccatttggtaatcatttgatttgatttcacttgcttacagaaaaacagattggaaaaaaaatgccagacgcagtggctctggcctgtgaaccagcactttgggggctgaggtgggcggattgcttgagcacgagtttgaaaccagcctgggcaacatgatgataccccatctctataaaaaaaattttttttttaattaggctggcatggtggtgcacgcctgtagtcccaactacttgggaagctgaggtgggaggataacctgaggcaaggaggttgaggctgcggtgagctgtgatcgtgccactgcactccatcctgggcgaccgagggagatccggtcacatacacacacacacacactcacacacacgaaaagaaaagaaaacacaactgcatttaatagtattaggtagaatttcttcttctttttgctccttatctcctccccttcttttaaaggaagaagtggtgaagtgaagtgaaatgaggaagggtattgacgtaagataaacctggatgtgaatgttgtctcaaccacttacccgctaactctggtcttgggcaagcacttagcttctctaagttttagttttcctcttaataaactgggacttgcagtctctacagttgcaaggttgttgtaaagctaagtattcatgcaagtaaaatgtgcaacaaagtccgagacatagttagtagatcatagtaaatgacaattatttttattataatagtaataaggtttacctagggattaagataagcagttgtatgaaacagtttgctgtattttatcacaagctgttgtggaggaaacccagaattatatctgttgttagccagataagatatgacctttaatggaagatctcataatcatgtaacttaaaaacagaaatcttactcaagaaaatcaaggggaataccattagaaacaataagagagttcatcaaaatgtctgtatggatatctcaaaaaatctaattgaatgattattactaatattgattagaagatacaatggaaaaaaaaatcacagttgtaaccactactgccaccactactactaatgataaaaagtttaaaagtcatcataacaagatatgtatgaaactcatatacatattttttaagttataaaatttcactgatataaaagaagactgaataagtggagacacatgttagtgctcatagatgggaaaattgaagttttttttgtagagatggaaccggttttgccatgttgcccaggctgaacttgtggactcaagtgatctgtctgccttggcctcccaaagtgctgggaatgcaggccagagccactgtgcctggctgaaaattgaatattgtaaagctgccagttattgatgcattaatttttaggataaatggaattactggggaaattacaatgggaatatttttggagggaatgtggcaataaagtttaggtggaaacattagtaactatgaacaactaaagaaatgtaaagaaggataatacattagtgaagcacattataaagctgcagttattaaaacttttttatgtgctgatataagaataggttgtttttttttttttttttttttttgagatggagtctcgctctgtcggccaggctggagtgcaatggcgtgatctcggctcactgcagcttccgcctcccaggttcaagcgattctcctgcctcagccttcagagtagctgggattacaggcgcccgccaccacacccggctaattttttgtatttttagtagagacagggttttactatgttggccaggctggtcttgaactcctgaccttgtgatccacccccctcggcctcccaaagtgctgggattacaggcatgagccactgcgcctggccagtaatttttttttgagacagggtctcactctgttgcccaggctggagtacagtggcatgatcacaactcactgcaaccttgacctcccaggcttaagccatcctctcactttagcctcctgtatagctggaaccacaggtctgagccaccatgctggagtaatttttaaaaattttttatattataaagatggggtttcactatgttgcccaggctagtattgaactcctgggctcaagggatcctcctgcctcagccacccaagtgccgggattacagatatgacccactgcacctagccagactaggtccacttaatagatcagacatagattctgacgtgtaaaaatattctcatatgtaatataaaaaggaccatggtttagccattcaccagtcgaaggacatttgggttatttccaatgtttggtgattatgaataaagctgctataaacattcagttacacttatgtgtgaactcagttttcatttctcttgggtagatacctgggagcagttattgggtcatatggtaggtatatatttaactttataaaaattagccagacatgatggctggtgcctgtggtcccagctactcgggaagctgaggcaggaaaatggcgtgaatccagaaggcggagcttgcagtgagccgagatcgcgccactgcactccagcctgggtgacagagcaagactccgtctcgaaaaaaaaaaaaaaatagaaactgctggcctgatgtggtagctcacacctgtaatcctagcactttgagaggctgaagagggaggatcacttgaggccatgagtttgagaccagcctggccaacatagcaagacccctgtctctgcacaaaatttaaaaattaggcaagcatgatggtgtgtgcttgtagccctagcttcttaggaggctgaggcaggagagtcccttgaactcaggtgtttgaggttacagtgagctatggtcatgccactgcactccagcctaggtgacaaagtgagatcctgtctcaaaaaaaaaagagagagagaagaaagaaagaaactgtcaaattatttttcaagcattcccatcaacattgtactagagttctacttcctcagcattgtggtatttggtattgacagttttttgaaatttgccattctcttagatgtgtagtagtatgtcattttggttttaatttgtattttcctaatgaaagatattgggtaccttttcaagtgcttatttgtcgtacatatatcttctttggtaaagtttctagatcttttctccatttttaaattgcattatttccttattgttgggttttcagggttctttatatattcttgatgcaagtgctttgacagaaatgtgatttgcaagtattttctcccagtctatggctgtgtttttattttcttagcagtcttttgaagaacaaagtatttcattttaataaagtccaacttatacatttttcttttatggattttacttttggtgttttatttgtaagctctttgcctaatgcaaggtcaatcatattttcttctgtgttttcttctagaagtgttatagttttacattttacatttagggctatgatccatgttgagttaattttttttttttttttttttgagacggagtctcactctgttgcccaggctggagtgcagtggcacgatctcggctcactgcaagctccgccctctgagttcaagtgattctcccgtctcagcctccccagtagctgggattccaggtgcctgccaccgcgcccagctaattttttgtattttttttagtagagacgagacttcaccatcttggccaggctagtcttgaactcctgacctcgtgatccacccacctcggcctcccaaagtgctgggattgcaggcgtgagccaccgtgcccggcctattgagttaatttttatacaaggtgtggtttatgtcaagttttaatcttttgtttatggatgtccaactgtaccaacaccatttatttaaaaaaaaaaaagcatcctttctccattgaattgccttttcatcttgtcaaaaattaaatttgttagatatttctgagggtttatttctgggctctctattccattggcttttgtgtaggttttttcttttttctttttaccaataacaccatgtcttgattactatagctttatagtaagtcttgaaatcaattattgtgagtcctccagctttgttgttatttggctattgaggtttctttgctttttcacatatattttagaatcaatttgttaatatctataaaaaatccttctgggattttgattgggatttattaaatctatagatctaattgtttgcattatgtcttccatatttttagatctttttgtttcttttttcatgttttgtagtttttagcataaaggtcatacacgttaattttgtatgtaagtatttcatatttttggagctattctaagtggtattaaaattttaaaaattccatctgttcattcataacacatagaaatacagttgatttttgtttgttaattttgtatcttgcaaccttattttttatttttttgagacggagttttgcccttgttgcccaggctggagtgcaatggcgcaatctcggttcaccgcaacctctgcctcctggattcaagcgattctcctgcctcagtctcccgagtagctgggattacaggcatgcaccaccacacccggctaattttgtatttttagtagagacaaggtttctccatgttggtcaggctggtcttgaactcctgacctcaggtgatccgcctgcctcggcctctcaaagtgctgggattacaggcatgagccactgggcccagcccttgcaaccttattaatgtcatttattagttctaggaatttttgtaataaacatttttttctacataagctttcatgttatctgtgaatagagacagtatttatttgtttatgtatttattgagacagggtctcattctgttacacaggctggagtagagtggtgtgatcatggctcactactgccttgacctcctgggctcaagtgatccttccatctcagccccaggaatagccgagactacaggcatgtgccaccattcctggctttttatttatttatttatttatttatttatttatttatttttctgtagagatggggtctcactatgttgcctaggctggtcttgaactcctggattcatgtaatcctcccaccttggccttccaaagagctgggattttatacgtgtcgagctactacccctggcccagttttgtttcttttttgatctgaagaccatttctttcttttccttgccttattccactgtctaggacttctaatatgattttgaataggagtggcaagagaggacattcttgccttgttcctgatcttgggagaaagtaattagtctctcactatgaagtataatgttaaatgtagtttcttcatagataccctttattaggctgagaaagtttccttctattcatagttttctgggcacttctcccatgaatggatgttaattttttaaaatcttttcttgcatcagttgagatgagatggcatttttctttagtctgctaacaggatggattgcactgattagttttcaagtgtcaaaccagtatttctggaataaatcccacttaatctttttatatattgctgggttcaatttgttgtttatatattactggttattttgttgagaggtttttgatccaagatgttcacaaggaatattgttctgtagttttcttgtaatgtttttatctggttttgatgtcaaaataatgctgtccttatagaattaattggaaaggattcgtacctcttctgttatctggaagacattttatagaattgatgttatttcttattaaaatgcttagtagaattctccagtgacgccatctgggcctggagatttctcttttggaaggttttaaactataaattctatttctttaataggtataggaccattaaggtaatctgaattaggttttgatagcttggtttccaagagattggtccatttcatcaaagttgttgaatttatgtgcatagagttatgcataatattccccgtagtgatgtcttctccttcattcttcatattagtgtctgaaaacaataacaatgatttatttctcattctgatggttcttctcctggtctctcttgggcttactctggctgtattggtagattggctacagctggaggatctaaaaatggcctcacccatatgtttggggccttgatggggatgactggagtagctgagacttgtctctccctggattcattgggaaccaaaatgatctgccatgtggaagtggaagcataaggagaggacttgatcatagtaaaatcctcagtaaatgctcatggatttatccaatgacgtggagaccaaagaaagagtttcaaagaggaaggggtatcagtatgtcacatgctgcaaaatagttaagcagaatatggcctgagaaggctattgttttgttttgggttagtaacttttgagagagcatttttagtagagtttagaaaagattgcagagcattaagaagaaaacgtggtgaagaaaaggaggcagtctgtatttttgtttgagaaattttatttagaaaataaatgctagttaaatggaacaggagactaaacagagaattgtgagagacccaatgcatatttgaaggtaaattctgtaaagagtgaaagcttgaaaaggctcaagtagggggacaatgggagtgggcagagtagagtcctggaaagagctctgggagaggatgcgataaagagcgcagttggagggattgtttggtcttggaaggagctggctagcctgaaactggagggaaggttaaattgatgggaaaaagcaggaagagagaaaaagaaggtctcagtttccatgaagttgcaaccatttgctggttgtacagtgggatggaagacttaaagagaagcttggaatagccaatgctggcaatggatattgaaacagtaagataaatctaaggatttagaagcagttctagggacttagtgaaagtaaaacctttaacacactaggtctttatattgtaactttctctaacaatgctctaggaacacggtagaggatacatagtggaaggtacaaagaacttttagaggccgggcacggtggctcatgcctgtaatcccagcactttaggaggctgaggtgggcagatcatttgaggtcaggagtttgagaccagcctgaccaacatggtgaaacccggtctctactaaaaatacaaaaattagccaggcatagtggtgtatgcctgtagtcccagctactcgggaggctgagacaggagaatcgcttgaatccaggaagcggaggttgcagtgagctgggagtgtgccatggcactctagcctgggtgacagagtgagatttagagaataagggtgtttagaatgctaatgagtaaagtatttgagtacatgatcctgtatagtaaatatttttctataatctagactagacttctctctttcttctaccttttttatgacttcaggaaacttgttgaattattccaattctggattaaaagaaggtcccttctgccagaaaattgtaaaaagctgtagtttaaccaactctaattcctaatcttccccaatcccttattttagagcatttattgtcatatctcgtttctgatatcaatttctgagagcattttctacattttaagaaaagtaggacatctggggagataaaacagtaaatatcctattctgatactgtcacatttttatctcatttcatcctcagaaataaccatattaaatatatttgctgtcattttgccttatgtattttgagactatggtattagatatatatctaatttagaactacatatttttaatgaattgtacatttttttatgtagtgaccagacctcttatctgcttatattgctttttttttttgcctaaacatctattttgtctcatattaattaatgtagctagctgtactagttttcttttggctagtatttacgtgcttcatcttttttccattcagttacttttaacctttaggtataattctgttttatgtcttttgtaaactgtttgtagctggattttgtgggttttcattgaatcttgaagatctttgtcttttaaattgaccagctctaattttattttataaaatggaatctgatttgaacagacatttatagctatttactgatcagtactgtgctaagccactatgagaaatgtggagaaatatgagaaaatttgccatcattgagcaatttaaaacctgtgattttcccttaaaacatagtatatacattctaaattttcaaaggaaattgccttctgatttacttattcagattattagatataccagtgggtcaattaaaaaaaagtttttgtaaaccaaaaacaatatacatggccatatataatttgacctttaattatttttcatgatagatgaaaagaattagccacattttgtacatggagacactgaaactcagagcagttagactcactaacagtcctagagctggttaattagcagcaaagtttgattttaaagtgttctgggtctgtctgattgttggcttcttaaagtgaaaagacatggactttggagttactcattttgggcttcagtctcttctttggtactgattagttgtatgatttgtttcatctatctgatactcagattccttgcttaaggtacctgcatcacaggattatggtgaacactaaaggaggccatttgtgtccagtttcttgtgtgatgtctgatatatgtatagtatatgcttaatagctggtaatatcatcattgttattagtagtaaaaactagcctttacaaccttttccagaacttgtcatcttgtctcattaattagatgaattatctctgaattgtggaaaactggcagtgagccagggacaagcactaacaacatgatttttaaatgtgagacagaaaattttctacaaaacctgggttatgttgccccatttatttcatatggctaccctaaagttgaagaaatgttttgctctagtaaattgtgactgggaattttaattgatacatttttattttcaaacaaaacttaaagcttttctttaaaagtagtggctttaatactacacatctctacaaagtctagtttaaagaaattcatcagctttaatattaagtttcccaagttttcaaagatttgtggcaataccttggcataacataaatgtgaaatgtaaattgagtattaatgttactctagagtaagactctcaaaacaaaaactcttgtgttgataattccttttccctacaatgaggcttttctgagattccttttcttcagacctaaaacataaaatatggtccaataaaaagtacattttgaaatacaccatatacttaggaaatcaggcctgtagtcaagataatatagttttgttggtttttttgtttgtttgtttattttgagacagggtcttgctctgtcacccaggctggagtgcagtggcacgatctcgtctcactgcaacctctgcctcccaggtttaagcgattctcctgcctcagcctccggagtagatgggattacaggcacatgccaccatgcctgactaatttttgtattttagtagagacggggttttgccatattggccaggctggtcttgaactcctgacctccggtgatctgcccaccttggcctcccaaagtgctgggattacaggtgtgagccaccacacccagccagtttgttggtttttttaaagactcattcgatgtacatgaagaggtttgaattgtgtattcctactcttgattttgacaatatttttccttttcaattcagaaatcaggaatgatgtaatttttgtggatccaatcctaggcttgtgaaaatgggtgaagttctttgttggatagattagatagattgaaagttatatttacatgcattttcctggtctttgtttaaacagagtagggtttttaatgatcaatctgaaaaagaaacaaacaattgcatatgaaaaaaggatagtaatcctatacatctttatctttcatttttttcctcttctccctcattgtacatgggagcagttgcagcctaagacttaagttggagccaaagggaaaagaaaagattgtactccttttagtgaaatagcattttaaatactaaaatgttccacaactccttatgcaataatcagctgaagcattaataacttcctgctatcttaaatgtaacagtcactttgaaaaagcctcaatcattagttgggtcccctgtggacgttagtgccaagttcagttgaaatagttgcttgtgggacaccaaggcatccttccagcaaaattttaaaaattgaatctagtaagacctcattgcttaaaaaaatttttttgcatattttaaaatttatatccaatgaaatttactcatttgatgtgcaatagttctgtcagtgttgatacatgtataatcaagatgtaaaatggttttattaccccctcaaaattcccctgtattgctcctttgtagtcagcccttccctcctgcccccagctcctggcaaacccctgatctgttctcttcccctggctcctttcatttagcataatgcatttaagattcatccatgttcttggatgtcagtggtttattcctttttattgatgaatggtgttccattatgagaatgtaccatagtgtatccattcactagttgaaggacatttgggtgatttccaggttttggtgattattaatatcacttatcataaatatttctgtacaagtttttgtgtgactataacttttcatttccctcagataaatacctaggagtggaattgctgggtcatatagtaaaggtataattaactttataagaaactgtcaaactgttttccaaagtgtctctactattttgtacttaacaccagtaatttttgaaagtcctgcatgcttgccagcaattagtattgtcagtttttttgtttgtgtattttagccattcaaatagagggatactcattgcctttcaaagtacagttttgcttttgacttccactgagtggatgttcctataatatttgcattgtgtgtgctgagaatagaactatttccatctacttttgcaagtcagactgtagttccaactgtctaaaactatgatatatcttttggacttagaacttgaatggccagtgctctgataaatattataaatttaggaataacttaatacaggttttttgtattcttaatagataacagtatttgaagatattaaaaagcaagtgtactacctaaagcaatttatagatttaatgcaatccctatcaaaatatcaatgatattcttcacagaaattttaaaaaaaaccctaaaattcatatggaatcacagcagacaaagcaatcctgaacaaaaagaacaaagctggaggcatcacactacctgacttcaaaatatactacaaaactatagtaaccaaaacaacatggcataggtataaaaacagacacataagtcagtggaacagaacagagaatccagaaataaatccatgtatttacagccaattgattttcaataaaggtgcccagaacacacattgggggaaaggatatattcttcaataaatgatgctgggaaaaatggatatctatatgcagaagaataaaactagacttcctatctttcatcttttaaaaaaattaactcaaaatggattaaagacttaaaagtgagatctgaaactataaaactgctagaagaaaacacaggggaactgctttagaatattggtactatacagccatgaaaaataatgaaatcctgctatttgtggaaacatggatgaagctggaggttatgttaagtaaaataaggcacagaaagataaatactgcatgttcttactcatatgtgggagataaaaaaaattcgagctcatgaaagtaaggagtagaattggagctgggcgtggtggctcacccctgtaatcccagcactttgggaggctgaggcaggcggattacgaggtcaggagttcaagactagccttaacaacatggtgaaacaccatctctactaaaaatacaaaattagccaggtgtggtggtgtgcccctgtaatcccagctacttaggaggctgaggcaggagaatcgcttgaacctgggaggcagaggttgcagtgagccaagattgtgtcaccacactccagcctaggctacagagtgagactccatctcaaaaaaaaaaaagagtagaattggaggtattagaagccatgaagggtaggtgagaaggaaggatgggaggagattggttaatggatataaaattatagctggatagtactaaatgagtactgatgttctgtagcacaatagggtaaatatagttaactgtaatttactctatattttcaaaaagctagaagagagaattttgaatgttcatagtacaatgaaatgatcaatgtttgaggtaatggatgtgctatttaatctgatcattacacattgtatgcatgtattgaaatatcactccgcattgcataaataggtattattattgtgcatcaactaacaataagagtgaaattgttgttgaatgaatgaaaaggactcagaaattgagttttgcaaaggtatttatgcagttttgcaaaaggctgtagattgaatttcaggctgtcttcctgaaccagattccggtgagtgctctgtattagttatagccaccagtagtcttctagtaatctatgcttaagtgcgataattttgtagatagaatttcaggcagtctttctgaaccagattcctgtgagtgctctgtattaattatagccacaagtagtcttctagtatctatgcttaaatgcaataattttgtaatcattttagtttaccagcagtattgttgtcagggtaacatttctttgttctaggagatttccatcatgactgaggacatagttattttattttgttacgcaaatttttcatttactgtttttatggttttttatctgcaaagggttaacacacaattgttccaaactgcttgagcattacagataattttagcactcagaaatgacttcaaaaagagacacagagaggacacattcattaggacatacaatcacaattagtattttccaaaaactcccatcattaatgcaaacaagctgaataccagaacataccaaatattctctatgagatagatggttaaaaattgaatgaagagagagcctaccaggtatattaaaggcctagaaaaggtcttcagtatgttcaagtaaataatctcttaccagagcaaatgtttgtgcacaaagggagggcaggtgggggtaggtggcaggggaacttatgggacttgtaaacaaaatcttttttttagggctaaaaaattttcatctcttggcttttggaatgtttgaaaaagtgcaggatttgattttctctgggactttatgtgactatcttcaaatacttaaagcagtttggcaaagattttagtttcttattcttcttcagggtgaaaatcactatattttattgttcttcagaagccaggcgataaaaggaaataatgttgccaagattttgctctctgtgagaacatttacattacccttctctaattatttctctatagagttttccaaagaattaaagggctgaaaggaaacctgctactcacacgataaagagtttattccatatttacttttaggcaattgaatgagctgttcggcatcttattcatacttgtctgcaattagctttaggtgtcctcttcatattgtttcattcccattaacatccacactggtgacttgccattaatcatgttgcagactcctttgtgctgctctggtgtctaagattctaactcattaaaaagtcagcacttcctcttgtctttggtccttctcattgcttctatcaattgaaacttccttccttctttttcatattgccacctttttactaaggggattgcattatttctgcattaactcctatctggttccgcacaaatgtctagacctgtgaagggtctgagattttactttacttacaagctaacaaattatcctggcacaatttagtgaatacccagagtgttttacatttattactgttgcttatactattcatttaacttgcatcatttcatttaaggtcagtcactgggacgggccttaagttctgagttacacacagaaaagatgcccatgctccctggcacttggtttactttgtattctcttcctttcctttggttttttggggcagaagtattaacatgatagtgcctttctgtcttgatgtgtcagcccccttcttatccctggggtggtctctcttgctgaaacatttgccattcaccctgctacagataaactgattagtaccaaggatatataattaataaatgctcatttttcatcttctctgaagccacatcctaaatccttctgtttttaccaatgtattttaaggcacacatattgttaatgagtggagcctggtataagtagaatatcgtcttattctctacctagatgaaccacaacatggatttctgcgtaacagcccactaattctgtttcccagacgttattcaaagctgctatagtactaaacccattttcaggcttttagatcttatccgcaggatataacgaagctatagcctgtgaatctaacatctgaattgcatttattattttatctgataccactttctacttttttccagctgttgtattaattattgcaatactccaaagcacttccagcttaagtattgggactgagtggtatagctactattattatgccctgtttacaggagaaaaaataaaggcacgcagagcttaattaacttgcctaaggttataaagttagtgagagagccggatttaatcttagccgtctacgtctacaatctgtgctcataacttcataactctttgctttactgtctcttcaaattattgtcatttgagaggtttaggtagtagatattgttatggattcataataggggcagtacagttagagtttatggagaagtgagtttcagctgattcttaaaatagagaataggtttgaatatgtgaaaaagagcattccaagatgtacagaataagcaaaggttcagagacaggactaaccggagtatgttcagggaataatgaagatattagactgactatagaaataataaataaccagtgaacttggttagtattgaaagtttatccattagaacttcactggaaaaaatattaagtgtttatatctgagttcttaaattcaattggattcttttgaagatactgctaatcttactcattgggaacattgactcagttttcagatggaaatacattagtaaggaaataatgaaataaaattcatagtttttattgtagaaaattttttttagtattttcattttttcttgagctagttctactgacaccaacatactttgattagttaactggtgataaaataggtccagcaggagaagttggatgtaatttgaatttctgcccgatttcagaagaaaaatgttaagtgttctggtcatttctggtggagtgaaggtcttgttatgaagttgtcattggcaggtttacagaccactgaacgtggctttgttatttacaaaaaccacaacacacatacgcagaaagtagctatcatgtgaaaacatgtaactctgtcaaagaaatgtcatgtttatgtagcctagtgaaaataagaatcttgattgtaatgggaagctggttcctttcctaagcttgaggctgaagaaatgtgaattttcctttgggttttgtgaaccacccaagtttgaaatagacataaaataaacaaataagctgccaatatttatttatttattttacgttaattattttttatgagacaggtctcactctgtcacccaggtgggggtgcagtggcaagatcttggctcactgtaacctcagcctcccaggctcaagcgatcctcccacctcagcctcccgagtagcgaggactacaggcccatgccaggatgcccgcctaatttttgtattttttttggtagagacgtggtttcactatgttgcccaggctggtctcaaactcctgagctcaagtgatctgcccaccttggcctcctaaagtgctaggattacaggcatgagccactgcctggtctatttatttgttatttgttatctttacaaactagaagagctgtgaagagcagggaaataaagtgacaccaaaggttaggaactgcagaagtgtgggaggtatagagttggccaagtgggaatttctttgaggaatcttttgttttgacttgtgtggataaataagctgcttgtgattacataaagaattttgaagcttaatttccttttctagaatggagaagcaaacccctttacaactctctttttaagagtctggatttgtagttgtctagtagctttttgaagtcatcaaaaatagtatcaaagattattttttccaagctaaactgtgttggtacagtgccattttatatagtgccttacctatttagaactgtaatttgtaccatagatttctcaggaccctttaagggtaggatcatagctattttggaatgggacctattcctaggatacatatgttaatacaaagtcctctgttactgctgtgtcaaactatgttgaaaacactttccttttgataaaatgaatagaggcagtagcaaaaaatgaatcctaactgacctttaaatgagtctttgcattagaaggctaaaactaagggcttctcaatatttttatccaaagaactgtctgactgcgaagaatagtggacaggggtgtggtggggaggaagtggggatggttaatgggtacaaaaaaaaatagaaagaatgaataagacctagtatttgatagcacagcagatagactgtggtcaataatttagtaatttatggacagtaatttaattgtacatgttaaaataactaaaggagtataattggattgtttgtaacacaaaggataaatgcttaaggtgatggacacaccgtttatcctgatatgattattacacattgcatgcctatgtcagaatacctcaggtaccccataaatatatacaccttatacacctatgtactcacaaaaattaaaaattaaagtatttctttcgaaaagtgaaaaaagtgaaaccaacaaacaaacaacaaagaactgtttgaaatatacttaaaagaaatgtttattttccaaatattttaatttgggaaagacattcaactcacagatcaggatgaacctgtaaactttctcctctggttttattgttcatcatttccttactttaaagtttctattcttcattaatttcttcctgggcagaacacattagcttatgattctagctatggcacaatctagtatgaccttgaatcggttgccaaagttaatcatctgagccttaggcttttgctgctatacagtgggattatttattatttaacatgttgtcatttccaacatgtgcccttagtgccatgtagataagcctgcctttggtggcttctaattcagaaaaactaataatacacacacacacacacacacacacacaacatgtcacacacacactacataatttatgtactctatatgtttcctgatttaagtaaactaaacgggatagaaagtaaatttgaactagagttaattttatctatccttacaaagttgtcatgaaaatttattaagaaaaataaaatagagttcattttattaagagggcattaaatcttagttggtaatgtctctttccttctttcctttgcagagtatgtatgtaactgctctgtggttggaagcctgaatgtgaatcgctgcaaccagaccacagggcagtgtgagtgtcggccaggttatcaggggcttcactgtgaaacctgcaaagagggcttttacctaaattacacttctgggctctgtcagccatgtgactgtagtccacatggagctctcagcataccgtgcaacaggtaagcaacagagggtggaactgaagtttattttattttagcaaggggaaaaaaaaggctgctactctcaaggaccatactggtttaaacaaagggggatgagggtcatagatttacaaaatattttatatacttttattctcttactttatatgttatatttaatgtcaggatttaaaaacatctaatttactgatttagttcttcaaaagcactagagtcgccaatttttctctgggataatttctgtaaatttcatgggaaaaaattattgaagaataaatctgctttctggaagggctttcaggcatgaaacctgctaggaggtttagaaatgttcttatgtttattaatataccattggagtttgaggaaatttgttgtttggtttatttttctctctaatcaaaattctacatttgtttctttggacatctaaagcttaacctgggggtaccctaatttatttaactagtggtaagtagactggttttactctatttaccagtacatttttgagaccaaaagtagattaagcaggaattatctttaaactattatgttatttggaggtaatttaatctagtggaataatgtactgttatctaagcatttgccttgtactgcactgaaagtaattattctttgaccttatgtgaggcacttggctttttgtggaccccaagtcaaaaaactgaagagacagtattaaataatgaaaaaaataatgacaggttatactcagtgtaacctgggtataacccaagatctgctgccacttaggagctgtgttccttgggcaagtaatttcctttcactgagcttgtttcttctcaaggttgttgtgaagattaaatgagttgatatatataaaatgcctagcacatgtcactcaataaattctggtttgttttaatttcaaaggaatattatggactgaaatgagagaacatgttttaagaacttttagctccttgacaaagaagtgctttatactttagcactaaatattttaaatgctttataaatgatattatactgttatggaatattgtatcatattgtagtttattaaaaatgtagaagaggctgggcgcggtggctcacgcctgtaatcctagcactttgggaggccaaggcgggtggatcacttgaggccaggagttctagatgagcctggccagcacagtgaaaccccgtctctactaaaaatacaaacaaattagctgggcgtggtggcacacacctgtagtcccagctactcgggaggctgaggcaggagaatcggttgaacccgggaggtggaggttgcagtgagctgagatcgcgccactgcactccagcctggtgagagagggagactctgtcttaaaaaaaaaaaaagtagaagagaacttcattaagaagtttataatttcaaatgcagcaataatcaatgcttctgatgcttaatattttaaaatagttatttgtcttaattttcacagcaactccttatatataggttactaggtcacaaagatagtaagtgccagagaaagaattccaaattaggtcttcaattccaagtccagtgtcttcactaccatagcataccgtagcatgtagattctataatgagaaaactgataatcactctattctttgagattgagaatagagtggtagcttaacgctgttccctccactccccctaaaacatgctcatacaagttagattcagaagtttcacattgcttaccgttttaaaagataagccattgttaagtttgttcattctggtgtctcatggagtgtccactactttctttggaataatattctgcaaacatatttgtggagaaatagaaaagtgtttacttctaggcccagtgctttattagaagagaaagaaataaaggaaggattaagagagagttttataatagaagctgtaaaagaggaaaaaacagtaatactgatatttatgtactatcttactgtattcataattctactgcaaattattcctgatttatcttttctctgacagttaatgctaccaagtttaatgctgaaaccctatcctgaaaataggtggtaaccataaagtaatggaaaagtacactagactagtaatctaaaggcctagggcaggggtctgcagagtatggcctatgaacctaatccaccccactgcctgtttttgtaaagttttattggaacatagttccatgcatttatttatgtattgtctatggctgcttttgtgctatagtggcagcattgactagttgtgatagagactgtatgggctgcaaacataaaatatttactatttggcctttttggaaaaagtttacccacgcctggtttatatggtggtttatatccaatcatggtgggtatttttaggtaatcatgtaactttaggcagttcactttaacctttattttattcattattttattttattttgagacagagtcgcaccgtatacccaggctggtcttgaactcctgggctcaagcgatcctcctgcgttggcctcccaaagtgctgggattataggcatgagccaccatgcctggctgaattcttttaagtgtttgtctttttatttgtgaagtggagataataatccatgtcctgtccctctcctgcataaagttgttttgtcttaagaagcaggataatgcatgcataaatcttctaagctgcaattgctagacagataatacaaataattatgggaaccattattgagcatatgctatatgctagggcactctactaactacttgatgtgcattatctcatttaatctttttttttttttttttttttgagacggagtctcgctctgtctctcaggctggagtgcagtggcacgatcttggctcactgcaagctctgcctcctgggttcacgccattctcctgcctgaggctcccaagtagctgggactacaggcacccgccaccacgcctggctaattttttgtatttttagtagaggtggggtttcaccgtgttagccaggatggtctggatctcctgacctcgtgatctgcctgccttagcctcccaaagtgctgggattacaggtgtgagccaccgtgcccagccatctcatttaatttttacaaaaactcccttgaggagaacattattattttcccattttgactgagaattttgatgtttaaagggtatagttaacttgactaattttatatactaaagctgccattcaaccatttgaacaaatgtaatatgtaagcagagtccaccaaatgacttcacagttcgtgtttttcctagtagaaagcctcttggtatttaacacccaaatgtcctagaattcattatctctcaattcagtgtgttttggcagatcattataaaatacatatttacatttatgtcccagaaatacagccaaatactgcattttaaacaaaataatgtgtgagaagtctgtgttaaattccagatataattggtagactgtcagaatcacatgtcaacaatttgaaaggtgcaccaaatatcaacaaagaggatatgtagcatgttactacttgtagccactgttaaccttaggaatggtttttgctcaggaagtgatgttttcagcattttatatcctaacattggagtttgttacttttgtataggtgctttactgtgttttagttacactttaggaacttggttagttttttggggttgacatgaaatgaattgtaatttttttcatttaaaattgataaataggttttttgttagtatctcatgtggaatatgtgatattcagtgatggacgattcatgcaagaggtggaagagacctataatattattactacgttacttaatggtggagatatgttgtgagaaatgtgttattaggcaatttcattgtcacacagcatcatagaatgtacttacacaaacctagatggtatagcctgctgtatacctagactatatagtatggcctgttgcttctaggctacaaacctgtacagcatgtttctgaactgaatactgtaggcaattttagtacaatggtaaatatttttgtatctaaacatagaaaagatacagcaaacgtataaaagataaaaacggcacacctgtctagggtacttactatgaatggagtttgcaggactgatggttggtctgggtgagtcagtgattgagtcatgagtgaaagtgaaagcctaggatattattgtacactactgtagaatttataaagtctgcacacttaggctacactaaatttatttttaaaaagttttcttcaatagtaaattaatcttagcttactctagctttttaacattatgatctctgatgttttaaactttttgactctttttgataacacttagcttaaacataagtccattgtacagttgtacaaaaatattttcttttttatatccttattctataagcttttttctattttaaaattttattttttacttattaaacttttgtgttaaaaactacgacgtaaatatacacattagcctaggcctacacaaagtcaggaccaatagtactgtcttccacctccacatttcatcccactagaaggtcttcgggggaataacatgcatggagctgtcatccatgataacagtgctttcttttgggatacctcatgaagaaactgcctgaggctgttctagttaactttttaaaaatcgtagatgtacactctaacataacaataaaaactgtagtatagtaaatacatgaaccagtaagtcatttattttcattattaagtattatgtactgtgtataattgtacatgctatacttttatatgattggcagtgcagtaggtttgtttacaccaacatcaccatgaacacatgagtaatatgttgcagtgtgttaccacagctatgatctcactaggtgatcggaatttttcagcttcattataatcttaagggaccatcatgatatattccatacgtcattgacggaaatgtcatcatgttgcacctgactgtattatttttccctgttctatatggactattttctatgtgtgcctacctgatagcttctgttatccttagtagttttcctttttttaatgaggtaacacatggttttatattatcctcatagcatcaaagtgtgttgatttctaaaatcctttatcatcttcttctaagtgaaatctggaaggatcttccttcccctgcagctcatgcaggtaatggttgttttctgtctcacactcttacttctggacctggagttgcaatagatatctctcttactcttcattgctgctctcagagtgttcttcccagcctccgtcctaaaaactcctttgaagctcatggcagcagactatgctgtcacacctccttgttgctgtttctactcctgggcaccagcctttatttcttacacttggctcactgttatctctggcactacacttgccataattttagatgattgcagtatctatagatgagcctaacaatacttcagcctctcagtttcttgacctctcttccagtaagttttcctccatgctccttccagtctttgtttctttacttgctgtatttcttgtttgtctttggcatattaaacttctgagataaatttatacttctattggtcacaacagagtcatttttttagttttaaaaaatattattaaaaaataaaggccgggcgcggtggcccacgcctgtaatcccagcactttgggaagctgaggtgggtggatcacctgaggtcaggagttcaagaccagcctagccaacatggtgaaaccctgtctctactaaaaatacaaaaattagctggatgtggtggcatgcgcctgtaatcccagctgcttgggaggctgaggtgggagaattgcttgaacctgggaggtggaagttgcagtgagctgacatagcactattacactccagcctgggcaacagagtgagaccctgtctcaaaaaaaaaaaaaaataaaataaataaaatattatttcagaatgtcaggcaatttgtcagaacaagtagtgtatcacagaagtagtttaaaagcctgtacttaaaggaagtctttataaggaaggcttaggagctctaaatccacatagccctaagcactgaatttcttagtaggaagttaaattgacatgaaactagaacagaaatggaaagttgcaggactgtgtactttgcaagaagatgtggatgaactctgagcaaacagctctgtgttctgctctgctagaaattatatgtgagtgggttaagggagaaaggaaattgtagacaagtagtgtgatgacgtgtagtagaaagggagcggaatttgaaattggtagacttggattctgttcttggttcagccactggctaactatgtgacctttattaagctgtttgacctctctgaacctcattgcttttatctgtaaaataggattaatatatctaacatgaaggatttttctgataattagtacaaaaatacagttagatagaagaataaagatctagtgcttggtaacacaataaggtgactatagttaacaatatattttgtatatttcaaaaagctagaagagtagatttggaatgtttccaacacaaaggtcattacccattgtatgcttatataaaaaccacatgtcccctataaatatatatgactattatatatccataaaaattaaaaattaaaaaaagtttaaaagaagaaaactaaattgtgcacatacgtgtgtgtgtgtgtgtgtgtgtgcctgtgtccacttagactggcacgtagattcagctcaataactctctactagttgaatctctttttggttttttggttttgtttctggttttttttttttttttttttttttaagacaagatctcgctctgtcacccagcctggagtgcaatgtggctcaatcatggctcgctgcagcctcaacctcctgggctcaatggatcctcccacctcagcctcccaagtagctgggaccacaggcatgcaccaccacgcctgcctattttttgtagagacagggttttaccatgttgcccaggttggtcttcaactcctgggctcaagtgatccatctgccttggcctcccaaagttctgggattgcaggcaggagccaccatgcctgacctgttttttttttttttttttttgtgtgtgtgtgtgtgtgtgtgtgtgtgtgtgtgtgtgtgcttgtttgtttgttttaactgaggaatagaattagtgttataccaaaaaggaggattaaatcaaccacccttgagtatgagtagattttggggtatttgttttttgttggtatgctagggaagaagttgttcattataaacagaagaaattctcttattgtcttcaatttttatttaaaaacctattatacaggccaggcgcgatggctcatgcctgtaatcccagcactttgggaggccgaggtgggtggatcatgaggtcaggagttcgagaccagcctgaccaacatggtgaaaccccatctctactaaaaatacaaaaattagccgggcatgctggcgggtgcctgtaatcccagctacacaggaggctgagacaggagaatcgcttgaaccggggaggcggaggttgcagtgtgccgagatcatgccattgcactccagcctgggccacagagcaagactctgtctcaaaaaaaaaaaaaaaatcctattataccttttaaaattgaatgctatatattttagaataataatagcttaaactgaatacttgctaggcattatcctaagccctttgcagttattaatttatgtaattttcatagcaaccatataatgtagacactattattattattctcatttgtacaggaaaaaaaatgcaagttaggtaatttgcctaatttgctgcataactgccagtaagtaaaagagttggaattaaaacatttgcagtctggatctagagtatatactcctatccactatgctggtacagcctttctcaaaatctcagatattgagcaaagagagtgagtattgtaagaaattcaatgctgtggtgcagacttcttgatattttctaaaaatttcttctagttgtcttttggtaatcagacactgaccctggtgtgatgtagctcatgttatgtaaataataactcttctttgtaaggactaatcctagttttggcgtagtagaaattagagcatgaaaggaccagccctttgatgaacaaataccaattgcaatatctgttatattgcccttcctttttattaggcactttggaatattgcttttgctcttgtcaagaaatttataatctaatctgtgcaaaactatgaaacacatacaatacaaaatagtttatgaatatctgcttaatttgtaagtatagtagttcagagtagaaaaagaacaggagtaagtaaattaaagtgtaataggaaaggctttccataggaggtggaggtcttacaggttatgatttagagtggcagagagatgagaagacctatcaggagaaaaaaaaaaacatgaaaattccagtgaatttcctgattatacaatgacataagaaatctgatatcctaacaccaaattctcttctgttgtgacctctctgttctcttttaaaaaatgagagtagaaaagtggattcaattctatcctgattccctcatatattgaaagtctatggaactaacaattggcttttaaaaaattcatttccctattctttatgcccatatatttcagtgggagtcaccccagtgagggtagattttggctgcaggagccagatgtgggttgagcaatgtctttgtgtgcaaacacaaagttctttatgtactgacggatgtccaccccctcacatcaccattggtgttccaacctgtttaattggaaggagttggtgtacagtatctgaacttttcagttttgcttttgaaacacatttcaaatgtttttcctgatttatattttgacatgtgcttaataaatgaatagagaaatcaggtagcattttatctcaaaaagcagtatgcttagtgaatgcgtgaatctcagtatagttcttaaaatgttatcagggatgcctttatatgtagacaattgcacattgatttgaggcttttttgccactacaacctccgcctcccgtgttcaagcaattctctgcctcagcctcccaagtagctgggattacgggcacccgccaccacgcccggctaatatttttttgtatttttagtagagacgggatttcaccatcttggccaggctggtcttgaactcctgaccttgtgatccacccgactcagcctcccaaagtgctggaattacaggtgtgagccaccgtgcctggcctgatttgagactttttaatgtattcacggtaggttagagtacaaggtgcatcattttagactgtcttagataaagaaattctgtattggataatatccttttccataaaatctgtcgttgctgctacacagtaagtcctcctcatcatcgtaggttcttggaaactgcgactttaagcaaaacaaggtacaacaaaaccaattttaccgtaggctaatggatataaacaagagttcaagttcatatgcatatttctggtcatagaaacatcaccaaactatcaaaaaaagaccaaaaacacttctaataataaacattgaaataaatgtgaactatacatatatgtaagaaaaattaataacaagtaagaaaattatttacctagttattccagtttagggtcatgggtggttggagcctgtcccagcagctcaaggtgcaaggcagaaccaaccctggacaggacaccattccatcatagggtgcattcacacaccccgccacactcaatcatcctgggatgatctcaacttgccagttagcctgacatgcacatcttttggatgtgagaggaaaccagagtacccagagaaaacctagaccgacatggggagaacatgcaaactccacacagatagtagcttccactgggaatcatttgtcttcaacaatgttgtactgaaactacattatttgaggactagctctacagtgtatcttaaaatttacagtcagctttccttatctgtgagttccacatctgcagattcaagcaatgcaggttgaaaatattttttaaaaaccaattaaaaataacagtacaacaataaaaaatgaaaatttaagaaaacagtataaaacaacaattatttacatagcatttacattgtattaggtattataagtaaccttaaagtatctgggaggacgtgcatatgcaaatactgtgccattttatggaaaggacttgagcatctgaagacttcggtatggtgggaaggtcctggagccaagccccatcccatgctcagggacaactgtatttactattttgcattttaattgtgggaatgtgcctcaggttaaaaggcaaacttatgaagtaaactgatgccaaaataaatttcaaatggaaagatgacaaaacacctcggaggcttacattcatatagggctctgaaggtcatctcttgtgtaatactggacagtaacagctgcttttgcaaactcttatttactactttgcctatacttctggaagattgagaaaaaggttatttgatcactagaaacaattaacaatttagaaaaactttgtcatttcattcatgttttatttttaaaaagacattgcatttgccaaccatatgtcaaaagatattacctctattctcaaggaacttactggctagtggacttgcaaagatagacttgcaaacattcggggagatcttaagagaggcagttgcatttggattgatattgaagagtgagtagaaatttgtataaagaaaaagacgtcttcactgattgcaagtggttcactatttcttgaagacaaagtttggtagtagtggggaagaagggttgaaaggaagtaggcaatgacaggatgacatttttgtctatttgtctactgttatatttctgacacctagaacagtgattggcacatactagatattcagtaaatacttgatgaatgaacagaatgaatgaatgaagaataaacggggccaaaccatgaaggccctgatgtgccttgtaaatacgtttatccattgaagaatatttaacaagaggtgacatcagacttgttttttggaaaaattagtctgccagaagtctggtggttagaaagagtgggctcaggcaaggaaaccagattgagaaagctgttgtaacaatctaagcaagagaacttaaaggcctgacttaagatattaatattggcattgacaatagtgctggaaatgagagaatttaagagatatttggaagataaaatatacagtactaaatggttgcttgtctatggagagagagagaaagagaaagagaaagagagatgactcccatgtttctggcttgagcacataagtgaagagctattctattattaataactaattaaagagtacagatagataagcaagttggagggacatgatgatgttaggtttcaaaaatgttgattttgaagtgactatgggatattcaggtagagatgtctggcagacacttgaaagtaagcatttgtatattcgttgtgtgtcaaactcaaaatctaatctagcatattcttatgctattttgtaggaaagcagaacaatacttcacttttttttattttaagataactttactctgtaccccaattattcctgcaattataccaatctctagtttaaattgcctttatggtacacttgaatatttttttccgtgaaagtagactttttaaaggtagccatcttgatcaaaagtaggtaactgcttttagcctttatcttattgtgattcatttgattcaataaatgcttgtataggaccaaatggtttatttcttagaagatatcaagtatgttaagttcatggaaaaacaaattaaagtttgcatgttaataaatggtcagagaggagcttgttcagaaaaaggcactgagtgcattgggatttaagtgtaaataatgcgtatctaatacattctggaaagctctatgtttttttcagtggatttttgtcttaaagtttccattcaatacagggcataatctgccctcctagtctaatcattaactagatatcagctgtagtcaaatgaatgaaaaaaaaaaaaacttttttccaggtctcggtgacctttgtgaacattaacatgtcacagtgtgttgatattgccgttgattaaacatgttaccgtccctaaaccatgttgcagactcctctacttatttcattttattaagttagttttaggccagtttataattttttaaagaaatatcttaaaattttgttatttatagtattagatcatttatttcatttttgtgagaagctcccctctaaatctgtagttgaatatatgctaatagtataaataattaagtttctataaatgcagtatttggtattatggtttctgttgaataaaataaataccttatactaaataccgcatttatctgcaggtaatttaataagccttgtgagagataaaagataaataagataatgggtctcattcaaaaggagcttctagtctaataaggacactattaaatatgtgtaaatagttacaatacaaagtaaaaattgacccacatcacaaaatacagtataaagataaaatgttaagaggattaagaagctgggagacatcacttatagctggaaaactcagagctgaattcattgaggaggtagcttttgatcccagctttgaaggaaggaaaggatttagacatacagaagtgaaaaaagatgagaaaggactttacagacagcaaacagcaagattaacatctcagagatgggcttactgaagatgtcaagtggaagaggagtggggacaggagatgagtctggtaagtcctgttggggtcaggtcacagggagcctttagggccagacggatgatttgggttttattcacaaagcaatttttaagcaggagaaagatcaacactggattgtagcagtaggagaatgagtagatgtaagtagggagagattggaggcagagtaaaaactaacaagggccaaaattagggtaatattagtgagaatggggagaatatttaaaatatggagagtagtcagaagagtcagaagggtgatacgccatgacagccatgtttctgtgcataattctgtggaaattttgtaatttttgcattaatacatacaaatctaaaggtagtttgtatttctaagttgaacttatggaaatgcttaggcacaaagttccttctcaggcccacaccctctccctgtgcttaccattcttcctttgttgcaggctgcaggaattgaatctgctttcctatgctccagcaattgctaccacccactgtatcccatgggatttttattcctgcattagccttgctgctgagtgtcaagcagtgtccccatatccacattctttctgcattactgaaaagaaatccaaaggccctttaccttttaagagtttttaaaactgttaatctttataaggaggcctttgagggtagcaaacaatagatattggaaagttgaaagcttatataattgacaaactttacttcttttatttttccaattaattgctctggccctcatatgcctaaatagcataaagtcaagtactctctcctcttgatgcaacacattatcaacaggtaactaattgtcctataactctaggggtcagtcctcctgtgatgctaggtataaaaggaatgtgattctgatcagttcactaatcctactgtttctcactgctacctggaattgttggggtgaagcctggtccctgaacaacctaatggatggatgatgcttgctcacaactgtgatgatgctttaactggtccagatccttgcagaggcagcagtgattctttaagggaggatgaacccaatcccttaatgccacattctttcaaggatgctctaaattaggtctcctaggttctagatcttaacaatcagctccttcagtttatatatgcagccacatctcattgtgtaagccggtcccaagagtactttttgaggacattttgtagaatcttttcactaacaaacctcaaactttcttccctccccagggcttaagcgcctttctttagtcactcaaaatataaagagtcttgttaaacccttatctcaggacagtagggcctgttcatgctatacttatgtaactaaaggaaacccaacttaaatgatttttcacagtcaggaggatctgcttcagggttattttcctacctctacccaaatggcaaagcaattgcacacttctcttgctaaagaagaaaggaactacaaatttaatctttataaacatctctcttatagggcattttactatacttaatgtgttttaaaaccttacgaacatgtagtgttttcctgtctgtagtttgacttccttctgagacaaaaataccacacaacttgacaaatgcttctgacattattactaccactatcaactccagaatgaacagcactaacatttaccgactgtttactatgtgccagggtaagtgctttatatttactgtcttgtaaggataaaataacagttaattgaaggtgatatattctattttacagatgaagaaactgaggcttaatttgccccaaaacagacaactaataagtggcagaaactggctcaaattaatatctgtctgactatcctgccttcagtgggtcctagtgtttgttaattggttggccgaaccactgcttattttcagtaagcctgatagccatcctttaagtttagctatcatacaaacagattcctagcattaaaaattatcctctgtgtgatcaaggtaacatcactagcaatatgtcatgaatattatgtatccctaatgtgatgagatgagaaagatacattacatttgtgatagtcttcctcaaaattcataacctcattctaattgtgacaagagatcagacaaacccaaattgagggaaatttcacaaaatacttgtcaagttcccttaaaagcttcaaggtcataagagacaagaaaagactgagaaactgtcagattggaagaggctgcggagacatgacgagtaaatgcgagacaatatcctagattggattctggaaccgaaaaaatggatactggtagaaaaattagggaaatctgagtagttaatagtattgtgccattgttaatttctcctttttgataaatatgtcctgattacatacgaagttaaacaggccgagcctcatggtgcctcacacctcttatcccagcactttgggaggccaaggcaggaggatcgcttgagcccatgagtttgagactagcctgggcaacataaggagaccccatctctacaacagattacacaattagtcaagcatgcttgtagtcccagctacttggtggtgcatgcatgtagtcccagctacttgggaggctgaagtaggaggatcgcgtgagcccaggaggtcaaggctatagtgagccatgatggcaccagtctgggcaacagagctagatcctgtctcaaaaaaaaaaagaaaaaaaaaagaaacattagtggaagctggatgaatggtagattagaacttcctgtactatctttgcaactcctctttaaatctaatattatttcaaaatagaaagttaataaaattgttatttgaagcagtcattcaagggagtatagacagtattatttatttgagggcaaagttggtccttatggtaattcttagccttaagtacagaagagaaattaggataaggaaataaacttactttgttgacctgccattttagatgtatgacattgtggttagaatgtacaatcaaattcatagcctattttaatgttcttttttctctgcagtttaaaatgaatagcttctaagactcatgttagtagacttaggctaaaatagaaggcctcttgttcccacagagaaggctttgtcttcctctctattccctgaaagaaaattaaatcagcatgactttttccatctcagattttttttttttcatagcaagaaatatgtttcctagaggatggagataaatatgggactgttcagctttttttcctccctggatgtgatttcttctcaaaatacctaaatttgtcaatcctagagggagacttggacttgaagtttctttagattttccataaaaagggacacaaatgcttcagccatgattattttgacatagtatataggactagtttaaaaattataaattccattattatggctttgtgtagattaaatgaatattctggtgtgatatattttgtgtgtttcaacaatttggggttttcaatttagtttttcagtttggggttttctacatacactacagaaggaacataggcatgtttctcacattgccaaaagcagtaatgcaagtatggcttatattgtcaataacaaaatctcttccttctcttttgccagtttccaacacatataccatgaccattactttaattaagttttacttttgctggccttgaattgattttcaaagggttctgcaattgaatagaatgtccattaaaacagatattgtggatatttgaaggaaacatttttacagagaaatatattagctttcttgactaacatgttcaccgaaagaagctgcataatccaggagaggcagcaggaggaacagaaggaaattaacattcattgaacactttaaacctccattcttgatgttttacacataaaacctctctgacttctcagacaactcatccattttgttcttagcagctaaattacttagcgacatggcataactaataaatggcagaacttagatttgagcccagatctgtccggctccaagtctcttcccactgtaccctgaaatagaataggcaaaattagatatggcagtgtgagcatctcaatgtaagtgcaaggctagctgtgggtgagtatgactcatcagtttaggtactggcctatggaaatataaatctagaaatcagacctgggctacaatgaaaataaatactgaacagaaggcaacaataaaaattgttaagagtatacatacagaatcattggaaaggaaaaggcaggaattagggcattagaaatatttaaagctaggtctgtggtttgggtgtcagaacatctgacttgcttgggtttaagttaaaaggcaggcatttgatatgtgagaagtctgaaagcaagtgtcatggacctagtcattgtggtggaaagtggagaggcagggccactgagaccaggagccaggcattgagaaactagggacaatagttgtaattaatcattaggaatataggggactgaggacaaaggaaccagtagcaaatgggacttgacagaccgctgaggttgattgccttaagtaccctcttcttaggttagaattgataccaaattcagggttcatcactatgcctggaagtggaaagtaagtagctttaccagtcagggatagggatataaaaaatagagtgaaataagtacagttaatttagtagagtagttctctaattatggtccccagaccagcaatatcagtttaacctggaaattgcttagaaatgcaaattcctaggcccaacaccagacctattgaataaaaaagtctgggatagggcccaagaatcagcatgctaaagtttcagaaccactgatctatgttggtggctctgagtgtgttgtcctcaaaacctaaggtcaacttatgcagatgcaaactagaactaagaaagaagggttttttttgaggcatttcaacctctattctttgtttttatgagaattgtataagctaaagaggccctattcagtagggtcatgatggaatattggggttgagcaaaatggatttttctttgagggctaggactttttctttctatctgctcttctttatcttactttaatgaacaaacctgagggatcactgtcttacaaggttgattggcctatcatgggctagtcattgaatgtctcattttgctcacctagaatgaatattctatttccaagattctaagaggtttatttaagtgtgacataaagtgtcaagattaagtgcatgctattcacaatagcaaagacatggaattaatcctgatgtccataaattgtagaatggataaagaaaatgtggtacatatacaccatggaatactatgcagctgtaaaaaagaacaaaatcatatctgttgcagcaacatggatacagatggaggccattatcctcggcaagttaatgcaggaacagaaaaccaaataccacatgttctcacttataagtgggatctaaacattgagtacacatggacataaagatgggaacagtagacactggggactactagaagggggagggtgggcggggggtaaagggttgaaaaactacctattgggtactacctgggtgatgggatcattcatacaccagacctcagcaacacagtttactcatgtaaccaacctgcatatgtagcccctgaaaaaagtcgataaaagtctaaagaagaataataaaattttaaaaaagattaagtacatggaaaatattaaatggactgaaatgaaaataaatattgcgcttagaagtcatcaagagttaatgaagaaagcacacatagactttggagccagattatgcaatcattaaacaaagtttgcatgcctatcacatgccaggcactgtgctaggcactgggaatatagcagaggaaaaaacacataaaacccccctgattccacagaactgacattctagatgggaagagagataataaacaagaaaataaaatttatggtatattaaatagtaagaaatattacaatttcagatagtgtggctaggcaagatatgttgagaatatgacattagaataaggaacaaaaagaagtaatagagcatgccatgcggatcccctgtggaaaagtattgccaatagagagaacagcaagtagagtccctgatgcaggaagatgcctgatgtatttgagcaacagcaaagtcattgtggctgaagtggtataaattgggaacaggagttagggggtagtatgtaaagcaaaatatatacacagatatccagaataccattcttttgatttatctatattttccaaagtttttatacagaaacattggagagaggtaaagctatagtaatctagacagggtggtattggttcaggataaacaaatagataaaaaagaaagcccagaagtaaatcatatgtataaagacatttgatatatggcagaggaggtactaaagcttaggggcataaagggtggatttatcaatgaatcgtactagagttttggctatctattaggaagaaaatgagtttgaacctttcacttatatgttatgcaaaaataaatttcaggtagatcaaagacctaaatgtgaaagacaaaatgtaaaatgatattggggtagagagggatttcttcaacaataatactaaaataatagcaacacttaggtagtttttactctgagtcaggcactgttctatatatgtgcttaccacatattaactaagttaatcttaacaaacctgtgagataggtcctctgttagacaaatgaggagctgaggcataaagagattaagtaatttatttaaggtcatatgactagtggccaggattttaatctaggtattctagctccagagttcctatctttttttttttttttttttttttttaaagacggagtctcactctgtcacccaggctggagtgcagtggcacaatctcggctcattgcaacctctgcctcccggattcaagtgattctcctacctcagcctcccgagtactgggattacaagcgcatgccgccatgcccggctcattttggtatttttagtggagacagggtctcaccatgttggccaagctagtctcaaactcctgacctcaaattatccacccacctcggcctcccagagtgctgggattacaggcatgagcaccgtgccctgcccagggttcctactcttaactatttcactaaaatactctccaaaatataaaaaacatatgggaaatatttatacattcaactggattaaaagtgaaaacttctgtttgtcaagagactttataaatgaaatgaaaagacaagccacaaactgagagaagataattacagcatatgaaactgacagatgattacttttacagaagtatataaagaatttttacaagtcaatgtcaaaaatacttggacaagctgggcatggtggtgcacacctaagcccaagctactcaggatactgaggcagaaggcttgctcgagcccaggagttcgaggctgcagagagctatgattgtgccactgtattccagcttgggagacacagtgagaccccatctctaaaaacaaacaaaaaatacttgggcagattcctcataaaagaggaaactcaaatggccagtaagggtgaaaagatgttccatctcattactaatcagaagaatgcaatttaaaaccatgttgtgatgctacttcaaggtgccagattggcaaaaatgtaaaagctgatagcgtcaagtattggcgagaatatagaacagtgagaccattattccgttgctgatgggagtataaattgttaccaccctgttggaaaataggcattgcccagtaaaattgatcatgcccaaatattgcctactgactactctaccccctatagggttcaaacctcaaagacttagaacttgggtataaaggacttaggcttcaaccctgtcagtaatgtttcaatttaagcaggtttttgtttgctgatctggaaactaagccaccatttatgcaatcgtttctctgagaaaatgagttctaaattataggcactacaagttaatttttggaatacagcaaatacaaaaattaggtattaataattactttttcagctgggtgtggtggcccatgcctgtgatcctagcactttgggaggccaatgtgggagaatcacttgaagccgggagttaaagaccaacgtgggtaacatagtgagaccctgtttctacaaaatcaaaacattagccacgtgtggcagcgtgcacctatagtcctagcaactcagaggggctgaggcaggatgattatttgagctcagtaggtcaaggctgcagtgagctgtgatcgcatcactgcacttcagtctgggtgacagtgagaccctgtctcaaaaaaagaaaaaggttaaaaaaaaatttaccctttcactaaacatctcttttacaatggttacaaaagaatacaaatattaacatatttgagaagcaacttcttggcaagatacctagaccctatattttgtctctacattttcttttttcaaaatgacttatgaagtgcagaaactatcaaataatgtagtactttttttttttttttttttttttttttgagacagagtcttgccctgttgccctggctggagtgcaatggtgcgatctcggctcactgcaacttctgcctcccgggttcaagcaattctctgcctcagcctcctgagtagctgggattacaggcacccaccaccatgcccagctaatttttgtatttttagtagagatggggtaacaccatcttggccaagctggtcttgaactcctgacctcataatctacccacctcggcctcccaaagtgccgagattacaggcatgagccaccacgcccggcctggagcaccattttttttttttttaaagcagaatacatactttattctttaaaatttcttctctctttttttttaaactttttttagtatttattgatcattcttgggtgtttctcgagagggggaatttggcagggtcataggacgatagtggagagaaggtcagcagataaacatgtgaacaaaggtctctggttttcctaggcagaggaccctgcggccttccacagtgtttgtgtccctgggtacttgacattagggagtggtgatgactcttaacgagcatgctgccttcaagcatctgtttaacaaagcacatcttgcaccacccttaatccatttaaccctgagttgacacagcacatgtttcagagagcatggggttgggggtaaggttatagattaacagcatcccaaggcagaatttttcttagtacagaaatggagtctcctatgtctacttctttctacacagacacaataacaatctgatctctcttttccccacatttcacccttttctattggacaaaacccccatggtcatcatggcccattctcaatgagctgttgggtacacctcccagacggggtggcggccgggcagaggggctcctcacttcccagacgtggcggccgggcagaggggcccccccaccccccagacggggcggctgccgggcgggggcgcccccccacctcccagacggggcggctgccgggcggacgggctcctcacttctcagatggggcggccgggcggaggcgctcctcagttcccagacggggtcgcggctgggcagaggtgtggagcaccatttttatgcttgtattttttctgttttaaaaaaaacagtgaaggaagtgaaaaatcactgtcctagttgaattaagttaactgttgcaagttgtggctctggaaatgtgtcacatttgatttttatgcctttaagttttacttctgagtttttaaatttttgaattttattttgataagatcagttatcacaaaatatttttgcacttaagcagtactctttttgagtattatgaatttctggccaccactgtcacaaatgtgtacagcctatgccactgagatgcttacagttattgctgacattgaataaagatgaagaatcttcatgaagactataccactgcacccaattggaaacagagtcaccaccaccttttcaaccagcaaactaaaacccaactgcagatgaaagtccttatctatggaagccactctagaaagttaggaagaggtaggctggacgcggtggctcaagcctgtaatcccagcactttgggaggccaagatgggtggattacttgaggtcaggagttcaagaccagcctggccaatatgacgaaatcccatctctacaaaaataccaaaaaaattagccaggtgtggtgacatacacgtgttaattccagcttctcatgaagctgaggcaagagaatcgcttgaacttgggagacagaggttgcagtgagccaagatcatgccactgtactccagcacaggtgacagatggagacttcatctcaaaaaaaaggaagagatgattgttccaccaggtgcacagacatcaacacagggacaccagaaatatgaaagagcatggaaataggttgccaccaaaggaacgtcactttctagtggcagacctgcatgaaaaggaaatcaactaattgccagaaaaggaattcaaaattatgattttttaagaaattgaatgatatacaaggaaatacagatagttcagtcaatcagaaaaggatttatgatgtgaatgacaaattcaacagagatagaaatcataaaaaaaagaaccaaccagaaatcctgcaactgaagaattcagtgaattaaattaaaaaatacaacagagagattcaacaaaagaaagaatccagcaaaagaatccctgaacttgaagataggtcattcgaaattacctagtcagaggaaaaaaaaaagagagagaaatatgaatgaaaaagagtaaagaaagcttacaagacttatgggacaccattaagtgaacaagtatttgtattgtgagagttctagggaagggaaaaggcatagaaaacctatttaatgaaataatagctaaaaaattcccaagcgtgtggagaaatttggaaatccagtttcaggaagctcagtggtccccaaatagatttcacacaaaaagatcccatccaaggtacttaatagtcagattattcaaagtcatatacaaagagagaattctaaacacaacaagagaaaagtgtcaagtcatgtataagggagtcttcattaacctaacagcagatttctctgcagaaatcttacaggccaggaaagaatgggttgatatattcaagttgctaaaaggaaaaaaaaagtgaaccaagaatactatacccagaaaagctatccttcagaaataagggaggaataaagtctttcccagataagcaaaaactgagggaattcatcaccactagaacagccttacatgaaatgctcaagggagtcctacatctgtaagtgaaaggacaataatcactattatgaaaaaacacaaaagtgtaacattcactgttagaaaagatggacaaaggagaaagagaagagaatcaaaccttatcacttcaaaaaaaccaccaaacatcaatgataaacaataaaggcagaacaaaggaaataaggatatacaaagcaaccagaaaacaattaacaaaatgtcagcagtaagtccttacctatcagtaataaccttgagtataaacagattaaatcccccacttaaaagatatggactggctgaatggataaaaagatatggcctaactatatgctgcctacaagaaattgtcttcacttgtaaagacatacacagactgaaagtaaagttatggaaaaagatattcctgaggcaggagaatggcgtgaaccccagggggcggagcctgcagtgagccaagattgcgccactgcactccagcctgggcgacagcgagactccgtctcaaaaaaaaaaaaaaaaaaaaaaaaaaaagatattccacacatatggaaaccaaaagtgagcagaaatagctatgcctaagtcagataaaacaaactttaagtcaaaaactgtaaaaagagacaaaaaaggtcattatatagtgataaaggaattaatttagcaaaaggatataataattgtaaatatatatgcacccaacactggagcacccacatatgcacatattattagatctaaagtgagagttagactccaatacaataatagttgcagatttcaacacccaatatctaacgtctcaacattggacatatcatctagacagaaaatcaacaaggaaacatttgatttaaactgcacttgagaccaaatggacctaacagacgttgacagaacatttaatccaaaagctacaaaatgtacatcctttcttttcaatagcacatagaacattctccaggatagaccacatgttagactacaacacaagtcttaacaaatttaaaagaattaatattatatcaggtatcttttctgactgtaatggaatcaaactagaaatcaacaattagaggaactttggaaagctatacaaatacacaaaaattaatatactcctgaatgaccactggatcaatgaggaaattttaaaatttcttggagcaaatgaaaatagaaacgcaacatcccataccatgctatgggatagagcaaacacagtatcaaaaggaaactttatagcaataaacacttgtattaaaaaactagcaaaatttcaaataaacaacctaatgatccagcttaaggaactagaaaagccagaaaaaacaaaactcaaaattagcagaaggaaagacataataaagattagggcaaaaattttaaaattgagactaaaaagcaatacaagaaatcagctaaataaaaagttggctttgaaaagataaacaaaattgagaaaccatcagctagactaaccaagaaaaaaagagaaaaaacctaaagaaataaaatcagaaatgaaaaagaggacattacaactgatgccacagaaatacaaaggatcattagaggctattacaaacaactgtatgccaagaaatctgaaaacctagtgaaaatggataaattctgcttgtatggaaacatgcaagctaccaagactgaatcaggaagaaatggaaaacctggacagcccagtaacaggtaatgagattgaatcagcaataaaaagcctcccaataaagaaaagcccactggttgcattcatagccaaattctaccaaacatatgaagaagaactaatactaatcctcctgaaactattccaaaaaatcaaagagaagggaattctccctaactcattctgtaaggctagcatcaccctgataccaaaaccagacaaggacacaacacaaaaaagaaaactacaggcccatatccctgaataacataggctcataaatccccaacagaatacttgcaaaccaaatccaacaacacattaaaaagaaaatacaccatgatcaagtgggatttatactagggatgcaagggtggttcaacacatgcaaatcaataaacgtgatacatcaatcaacagaatgaaggacagtaaccacatgatcatctcagtggatgcagaaaaagcatttgataaaattcaacattccttcgtgataaaaacactcaaaaaatagacagaagaaacgtacctcagaataataaaggccaatatgacaaaccaacagccagcatcatacagagtggggaaaaggtgaatgcctttcccctaagaactggaaaaagacaaggatgcccactttcaccactcctattcaacataataccagaagtcctagccagagcaattaggcaagagaaagaaataaagggcatccaaattggaaaggaggaaatcaaattgtctgtttgcagatgacatgatcttttatatagaaaaccctaaaagctccaccaaaaagctcttagaactgataaatgaattcagtaaagttggaggacacaaaatcaacataaaaaatcagtgctgtttttacacagcaacagtgaaatagtggaaaaagaaatttaaaaaaccaatcctatttaaaatagctccaaaaaaaaaaaaaaacacttaggaataaatttatccaagaatatgaaagatttctacaaggaaaactataaaacactgatgaaaggaaattgattaggacatttaaaaaattaaaagatattctatgtttatgggttgaaagaattcatattgtggtctgggttcttgggaggccgaggtgggtggatcaccaggtaaagagatcaagaccatcttggccaatatggtgaaacctgtctctactaaaaatacaaaaattagctgggcgtggtagcatgcacctatagtcccagctattcaggaggctgaggcaggcaaatcacttgaacctgggaggtggaggttgcagtgagctgagatcgcatcactgcactccagcctggcgacagagtgagactccatctcaaaaaaagaggaggaggagaaggagaaggagaaggtgaggaaggagaaggagaagaagaattaatattgtgaaaataaccatactaccaaaagtgatctacagatttaatgctatccctatcaaaatatctatggcattcttcacagaaatagaaaatacagggccgggcacagtggcttatacctgtaatgccagcactttgggaggctgagactggcagatcacttaaggtcaggagttcaagaccagcctggccaacatggcaaaaccccatttctactaaaaatacaaaaattacccaggcatggtggtgcacacctgtaatcccagctactcaggaggctgaggcaggagaattgcttgaacctgggaggtggaggttgcagtgagttgagattgcaccactgcactccagcccgggtgacagggcaagactccatctcagaaaaaaaaaaaaatgcaatcaaattcatatggaaccacaggggacctcaaatactcaaattctgagcaaaaagaacaaagctggaggcaacacactgctggacttcaaaatatactacaaaactttagtaaccaaaacaacatggtactggcataaaaacagacacatagactaatggaatggaataaagaatttagaaatgaatccacatacttacagccacttgattctcagaggtgccaaaaacattcattgagaatgggacagtctcttcaataagtggtgctggggaaactggatatccatatgcagaaaaatgaaactagacctttatctctcaccatatacaaaaatcgtttccaaattgactaaagaactaaatgcaagactgaaaactatgaaactactggcagaaaacatagaagaaatgtttcagggcagtgctctgggcagagattttgtgaagacctcatcagcacagacaataaaagcaaaaatagacaaatgggatcggatccagttaaaaaacgtttgcacagcaaaggcagcaatcaacagagtgaaaagacaatatgcagaatgggagaagatatttgcaaactattcatctgaaagagactaatatccagatatcttcaaacacctcaacaaccagtaaacaaataattttaaaaatgggcaaaggagctgaattaacatttctcaaacaaaaacatacaaatgaaaagtactcaacatcactaatcatcagagaagtacaaatcaaaactacaatgagatgtcatctcacccccattagaatgtctgttatcaaaaaggcaaagaatacatgctggcaaagatgcagagaaaaggggactcttatacactgttctagtggaaatgtaaattagcacagccattatgaaaaacagtatggaagttcctcagaaaactaaaaatagaactatcatatgatccaacaatccctctactgggtgtatatctataggaaaggaagttagtatgccaaagagatatttgcatgcccatgtttattgcagcacttcacaatagccaagatacagaatcaacctctgtgtccatcaccagaagagtggctaaagaaaatgtgtgcaatggaacactagttagccataaaaaagaatgaaattctatcattcatggcacaatggatgaacttgaagaacattatcttaagtgaagtcagacagatgcagaaatactgcatgttcctacttatgtgggaactaaaaatgttgatctcatagaagtagaaagtagaatagtggttattaaaggtagaaaaggtgggaggggaagatagccaaaggttggttaacagatatgaaagtatacatataggctttgtattgacataccacactgtaccccataaatatgtacaattgttatttgtcagttaaaaataatagcaaaaaaggctactcagcaatgggcggatggtcaaggtatactgaactgtaccattaaagagtgaaaatagccatagacaatacgtaaattaatgactgtgttccaataaaacttttcttttttttttttttgagacggagtctcactctgttgcccaggctggagtgcagtgatgcgatctcagctcactgcaacctccacctgccaggttcaagcaattcgcctgcctcagcctcctgagtagctgggactacaggtgcgtgccaccacgcctagctaatttttgtatttttagtagagacgggtttcaccatattgtccaggatggtcttgaactcctgacctcaggtggtccatcctccttggcctcccaaagtgctgggattacagatgtgagccactgcacccagccaaaaatttttttggggactgtctcactctgtcacccaggctggagtgcagtggcacaatcttgcctcactgcaacaacctccgcctcccagattcaagcaagtctcatgcctcagcctcccgagtagctggaattacagccgtgtgccaccatgccattaatttttgtatttttagtagagacgatgttttgccatgttagccaggctggtctcgaactcctggcttcaagtgatctgccttccttggcctgtcaaagtgctgggattacaggcatgagccactgcacctagcctgtgttccaataaaagtttatttaaaatgtgtctcaggcaggatttggctctgttgttcagattaatcatcatgactgggccaggcacagtgactcacacctgtaatcccagcactttgggagaacaaggctgaaggattgcttgagcccaggagtttgagaccagcctggacaatataatgtgaacctgtctctacaaaaaataaatttcaaaaagttatccaggcatggtggcacatgcctgtagttccacactcaagagattgaggtgggaggatatcttgagccagggaggttgaggctgcagtgagctgtgatcgcaccactgcactccagcctgggcaacacagtgagaccctgtatcaaaaaacaaaaaacaaaacaaagtcatcatgactggagtgttgtactcatgagaaaagttttcagaggctatgagattgtatcattgagaggtggttattgtttcaagacaattctctaaagatctcttgtgcttttgcaagcagaggcactgccttgttctggactatttattcaaggatatttgcatagcaaactgccttggaaaatagagctaatatcttcctctggagtaaagaacagatttgccactgtccaatataataaaaataaagtctccctcctgggcaaagatcaggtaagctcactgtccattataaaagatttggattctctgagtttggggttcttcttctgtaacaacccacctcatatgcaggcatcactggccctcgttgcatgaccgttgggaattgaggtttggggacatggtgtaaatgctgatactctactctagctactgcttttgtttggaggaataaactgtcctctgtctctgaaaaaaaaaaaaaaaaaaaaaaaaaaacaacgacaagaatttctgtctgaatatggatttcctctaaacatattttagactatttgccctcaaaaatacaaggaatgtttagcataatagcccaatgttttcaacaataaagctatcctttttttcctccagaagcctcgcttattgcataatgatcttttccataactgtggaaagacagaggaacactaaattcagataatcttttgccagaaagtccaattattaagtttcttttaacaagaggagaaactattattttcttacctctacaaaatcatgacccagacatgaaattaagaatttttaataacgttttattttatttttccatataaaacctttttgtagttggaaaaactttttctagctaccttttaaagttcgattttaatatattgagcgagtttataatcagcagtttggtattactgatttcagacttttaattactagtttcagtctcttcccaaagtaaattgttttttagttatttaaaaatagcttaaaatgttatttttaagttcatttttaaaagtggaggaagaagaaaattgatacatttcattatctcttaattgtgtttcttattgtcttcatgtcagagtgtcaacatgtgtaatgtctgaggaagaaggaaaggggaaaagcaaaagttcccaaatgaccacaaatgaattaattttctctaattagaactatgggctgggcgcagtggctcacacctgtaatcccagcacttggggaagcccaggcgggtggatcacttgaggtcaggagttcgagaccagcctggccaacatgacgaaactctgtttctgctaaaaatacaaaaattagccgggcgtgatagtgcatgcctgtagtcccagctacttgggaggctgaggcaggagaatcgcttgaacccaggaggcggaggttgcagtaagccgagattgtgccactgcaccactccaacctgggtgacagagcaagactccatctcaaaaaaaagaaaaaggaaagaactatgtataatttttaattattctgtaactgcttgagttaaaattgataatgtgatacctaaaaatatacatacacacgtactttatatcttgtaaatcttaggaagaaaatagactttcttgataacaaaaaacatgccaagacatttaacaatttagaaataaatcattaactagttggtagaaaagcaagtcaggtccagctggctttgatcccacctaatgtaggattttgcagatcctttctcttctcgattaaaattttttcccccaaaactgtttctaccatgtgtttataatgtgctctctttttctagccatatttttgctacaaactagtaattatcctttaatgttttgcttttttttagttttattaacagaattctaaaattttaaattacttacaaattttaaattttaaaagtaagtaacttagtcttccctgtctttgccaactgggaattctaacctactttccttagaattctcagaaaatatttaagatctaggatcactgtcatcatgtccatagttgctttcatttttgagtactgagtatgtgccagacactgtgctaaatgcattgtgtatgcaatttttaatatactacaaaggttggtataattgtcttcacttaacaaatgagaatacagaggccaagatagaatgaatactttgtgccagctagtcactagtagagctggaatatgaaccaaactctgtttcctcgggctggttttttccataaactctgatactcctttcctgtattatacccatcccacctaatcaatgtgactgtaaaataatggaaattctgaagcttctccacccactcatcttaaacagagtctttaaaaaggtaatttggcttgtattcatgtgacatagatatgtaccatatcttgagatgatacaccagtgaattttcttttgaaaaagtaatgactattagtgttgtaaaatatgtttttatttatatacacttaaaaaatgcttttttctaaagtgttaaaaccttgcaggagttgttcacacccatgagtatgtaagttctataactgagcattactaccacaagaaaatctgagaatcccttttgggataatttaagaaatgtgtagtatatgcatagttacacttaatgcagcgtagctccacaatgcttatgcttcgtttatgaataattctatattcttttttttctgatataatttttgtgctatcttggtactttactagcaacatgtcattaagaccagataagcaaattttatcttaaattgttagctgatctcatagtacagatgtctgatttctatttaaaatccagttctacacatttattctccagttatgaagctgtgggttttggttctttcatttcaaatctatggataagcataagtggtctgttcacagccttttttttttcttttttggtttcattgcatttatatcattgacctttgcttcagaaagcattcaagtctttaacagagagagaccatgaaagggagtgttgtaaagtctttattctacgaaggaagtcacacaggcaaagctttatatttgctgagtgatttcttttctttctttttttttttttttttttttttgtgagacagagtcttgctgtcacccaggctggagtgcagtggcgcaatcttggctcaccacaacctccacctcacaggttcaagcgattctcctgcctcagcctcccgagtagctgggactacaggtgtgtgccaccatgccctgctaatttttgtatttttagtagagacgaggtttcactatgttggccaggctggtctcgaactcctgccctcgtgatccactcgcctcagcctccgaaagtgctaggattacaggcatgagccactgcacctggccgatttaaatcttttttttaagagacagagtctccctgtgtcgcccaggctggagtacagtggctattcacaggcccgatcatggcacactcagctcaagaggatggcttcaattccctgtgatgtcatttcctgcctaaccagtcagcacttctggctccctggtttcaccccacccaccaagttgtccttaaaaaccctaatccctgaatacttagggaaactgatttgagtaataataaagctctggtctcctgcacagctggctctgcatgaattactctttctgtattgcaattcccccatcttgataaatcagctctgcctaggcagtgggcaaggtgaacccattgggtggttgcaggattagtctcctgtgtttcttggtctgtggggctttatgagagacaggtttaatttgagataagtggacccagctgtttattcctgtttaactgcagttggagtagttcaggcagcctagaactcctgggctcaagtgatcttcctgcctcagcctcctgagtagctgggactataggcatgtgccaccatgcctgataaatttaattcttatacatgcagaaattggccttgggccatgaataacatgatgcaaaagcactagtagtgcagcctcacaaccaaaattcctcacttcattttttttttttttttttttgagacggagtctcactctgtcacccaagctggaatgcagtgatatgatcttggctcactgcaccctccgtcttctgggttcaagcagttctcctgcttcagcctcccaggtagctggaactacaggcacacaccaccactctgactaatttttgtatttttggtagagacggggtttcaccatgttggccaggctgatcactggtcttgaacttgtgacctcaagtgacccacccacctcagcctcccaaagtgctgggataaaggtgtgagccaccacgcccggcctatattttcttttaaaagagagaaaagcacctttttttttcttgttgttttaaaatctggccatgcatggtgtctcatacctgtaatgctagcactttcggaggccaaggcagacggattgcttgagctcaggagtttgagaccagcctgggcaacaggggaaaaccctgtctccacaaaaaatacaaaaattagccggatgtggtggcgcatacctgtagtcccagctacttgaggggctgaggcagaaggaccacctgaacccaggaagttgaggctgcagtgagccgaaatcacgccactgcagcctaggggactaaatgagaccctttctcaaaaaacaaaaacgaacaaaaatcacccaggaaaaaataaagcatggtatgtacactcagacaactactttatcaagattcattaagtcactttaaatcagcaattaaggagcagatcctccagatagaaagtcttttagtgccccaagaattattaagggaaaacccacttcaggaatagcaactactttgggaacattggctatattatggttacacaatattattaagtgattttgtgttcgaaactaataccttcttcttgtaggttgtgggttaggcaaacaccatcattgaaagtaactgtttatccttttgtatattgaataacatatttagaggaatgaggagtaagcatattttgattaacattttaaaagccttggaaataagctgatgaagtgttgtaagccattctttgaaaggtacattatgttctttataattttctgatagtatagagtggcttcgattgactggttccttcttattgagtcataaaatattcctgaattttattttttatgaatacaggttttctttgctagatctttaagtaccttgggatattcttgtgtaagaccgtatatgtgtgtggcttcttttcttttttctttactaaattacttaagattcatagattcatgcttgatagtataaattagataatgtaaatttttgttgcatttttaaaaacatctcctatactatgatcagtacaaattttatttaagctttaaacatcaaaatatttgggcttctatctctgagaacctttgactttgttaggctgcagcttctcttcaagcaataagatttctcagcctttgttaaagacctgaaatttacttgcagtgagaaaagagagcaagatttattgtggacagggcataaacaccatcactggagtcaggacctatatagatggtgaattgtaatgctttggatctacagaatgaagcttgatacctaagtggatatcaagttatttggcagacaaatttcttgtaccaatttagagtcaatcttaggagtagatagtatggtggggaaaagtctggctttgtatgaatagacttgacttactagctgaggacagtaactttatctgaattttctcagtagtaaaataagtattatgaccctcaccaggtagaactaccttgaggattagagaaaaaatatatttattgacataagccctcaataaatgatagctcattgcatcatcattattactcctgctttcaaatgcctccattttaaattttctgtaaaattatttgttagctaagaaattgcattatgcaatacactagacagcttttaatagcaatacagaatttgataggtgatttatttggacacaaggctttgagatatggtaagtatatatgatttacatgagctgggctttctttcccttctggggtgttactcaatacaacttttaaattgatttacttttattcattgtctttgcttttatttgcagttctgggaaatgccagtgcaaagtgggtgtcattggctctatatgtgaccgatgccaagatggatattatggctttagtaagaatggctgcttgccctgccaatgcaataatcggtctgccagttgcgatgccctcacaggtacgtactttccttaactttgtcatgtaattattccactgttcttttaatttggaaatctttcagctataggttgattcttctgaaatagtttggaagggcctttatcttctaagtaggatgtactagatcacagcaagccaaactcctgctacaacaaacttgaaaaagtacgtaaattaaaaaaaaaaaaaaaaagtcatatacctatggaggcaaggagaactataggaactaaaattccagaaaggttggaactcttcctaggtaaactgatgatcaccagccattgtctttccaggggacatttgctgattctgagcataggcaaagaatgagctagacccaagcaaaggaattctttaggaaagagatacaagaaatgtttttggcagtcatttgaggcttgcatgatggttggaaacaagaggatccccaaacacaaggccagctttcccacaggatattagccgactatgcaaaagatggaaggctgggccagaaaggtagaaaaaaatctctttctctttcagtcttgtgctgaggagacaaaatccctttagaaagagagggcctgctatgacattcaattatctccccctcaagatgtcttcagactctgagggtgcatgcagtgggacctaagctcaaattaccaaaggccaatacaaatctctcacagtcttttagggctaaggagacacaggcttgctaggctctgaccaagaaatagtaaggaaccagaagttgattaactcatactaaaattacagtccaccctcaagccgcctcaccttctgattggattgaagtaattctctcattatatctgcctaacagatgaaaggggagccctctctggttcttttatatactgtgtccggcatacaataaaaaatactggacaatgcaaagacagaaaaatgtgaccaataccaaagagaaaaaaaatgagcaatggaagcagacctttaggtgatctaggtgttagagtcaacttagaaagacttgactaaagttagtattttcatacaataaagggaaaatcagacaaaataggtgaagagaggcaaaatgtcaatagaaattggaatctctaaaatatcaaatgaacaaactggaactgaaaaatacaacatgtgaattaataactcattgcattaatctaacagtagattgtacacagtgaagacaaagttagaagacttgaatacagtacaattaaaaatatccaaactgaagcatttcgagaaaatataatggaaagaacagagcagggaagatgtgggacacagccaaaaggtttagcataaatgtaattggagatctaaaaagagaggaaagtgatactggatcccagtaatatctgaagagaaaatggccatgaattttccaaatggattaaaggtgtcaaccgacagattcagaaagttcagcaaaccctaagcaatataaaacaaagaaaaccacatttaggcaaacttagtcaaaccattaaaaactaaagccaattaacttctgatcttagttttcctaaatgtaagaattaagtatccttccttggaaacattttttttcccaaacaaacaagcaaaaaaaatcaggacacactagtctgacaagtacaagtgtttttatgagaacagggtggcaaaatacttgaagtcaaaagtaccctggaaaaatcggttgaaagttttattcttcattcaaatactctatagtaaaacaaattgatttagaagaaattgttttttttttcttttatgcgatcttgtctctgcctatttgccagttttatcttgtggcgttctttttctttacatctgtgatccagtcagactggcttttatttctaaaacaaggcatgttccctggtcccagggttctcatatatgatctttcctctgccaagaatggtttttctaatccacctctacctccatccttgacccctctgccttattaaatcacattcttccctcgagtcgtcaattaaaggccacttcattagaaagcatttcctgatgctctaggcttaatggtaatttccttattatatgctctcacatatacttgtattttttcatagcacttttcacagtttgtaattgtatatttatttgtgattctgagtcacatatggctcactcatgagggcaagaacttttttttttcaccattgtatacacaatctctagcatggagctttagcatatagtaactactcactaaatttttatcaaataaatgaacaaatgaatggaaaggcgtacagaggaaagattattttcaatactgagtaacaacaggaatacttcattatactgagtcgattaaaattactccctagatcttttacagtaccgaaaagcagtctacattgctgattctcagttttaatttttcttaaggcaacgaggccactgtctttactgtcatgtaagtgctgacctgtcctttctctggagataatttaaggcaaaataattcttttcatggttatggtttctaaaagcagctagtagtgagagaaataaatgggttctttgtttggaattataataaaagtggaatccaacgtgaaggagtgcaaatactgtatttaaaattacaagctttatataaaaccactctcgtcaagtgactttattttcaacagtgctgtgataaggttgccctctggtggccacttactgtgttttcacagtcctattttcaccccctctactgttttgctataccttgtgttttagattgaagtagattttcaaagtactctttttttgtggtaagatatatttggataaacattttggaaagcaatttgacagtaagtattagaaatcttaaaaattgttctttgatctggtagttctatttccaggaatctattctaaggaaagaattctaaattcttaagaaggttatattcagagatgctcaccaaaatggtagttacaattttaaaaagttaggcaacccaatttctcacaatagggtattaagtaaatactgttatctaggcagtatattattaaaaacacagaaaaccaaatgttgaccttaccttgagcaagttgcttaatctgtttcttcatctataaatttgatataatagcagtaactgcctagtgggttgtcgtgaagattaaatgcaatacacttgtacagcctttatatagtgcctggtccatcacaagtaatcagtaaatggtaactgttactatgttctcgataaaatgttttgttttgttttgttttttctgaaacagagtttcacccttgttgcccaggctggagtatggtggcgcgatctcggctcactgcaacctccacctcctgggttcaagcgattctcctgcctcagcctcccaagtagctgggattacaggcgcccaccaccacgcccggctaattttttgtatttttagtagagacggggttttgccatgttgggcaggctggtctcgaactcctgacctcaggtgatccgcctgcctcggcctcctaaagtggtgggattacagatgtgagccactgtgcctggctgataaaatgttttaaagaatgatatatagcaatatgagaaagtgaaagaagcaaggtataaaataacttatgccatataattagactagttaaaaaacaaaagccaaacccctgtaaatgaggaaagattacaaagagaagtactaaaaatcttttttttttttttgagaccgagtcttgctctgtcaccaggctggagtacatggcacgatctcggctcactgcaacctctggctcccgggttcaagcgattcttctgcttcagcctcccaagtagctgggattacaggcgcccaccatcacacgcccagctaatttttgtatttttagtagacacggggtttcaccatggtggccaggctgatcttgaactcctgacattaggtgatccacccatctcggcctcccaaagtcctgggattacagacttgagccacggagcccagcctaaaaatcttaatgagagatttcctaggatgattttttacccctttctactcctgtatttttctagattttctttattaagcacgtttcccttaaaatggaagtggggggatattatttttaaaactggaacttcatgttcatataatatacttcctttgaaaatccagtgtacctttatgtattcatagtgtcccatgatgagtaacttgacctgagcagcttgactgagttgaccaatcctctactccccaatgatacttacttcagagtatcatgctttcctagtttttgtgctacctaaccagcttttccttcttatttgttctactacatcttcctcagttcagctccaagcactggagtgcctcagggctcagagcttgtcaagtttgtctttgccatttaaactttctccctaagtggtctcattcagtcccctggatttaatttgtatttgtttgtttgttttagctcattttcccccttaaccctggatttaatttaaatgccatctatatatgtgcttattatcagatttgcatttctccgttgatctccacactcaaatatccaactgtcaaatatccacttgttttaattggcattatatacctaacacatccaaaacaacttttttttcaacttataagttaagcctgctctattcatttcaccaagttactcagtcccaaagcctagtagtcatttttgattttgctcctttttattactgcaaatatccagctcatcagtatattccatcagccctatcttcaaaacataccctgaatctgaccactgttcatgacttttattgcatcatccttgcccaagccactgtcatctctttgaactactttggcacagtctcatctggcctttcagcctcctctcttctctccctattctctgatccccaccccaccacagttagtctccacataacaaccagagcaatctttttaaaatgtaaaaccagatcatgtcattttcatgcttaagccctccaatggcttctcatcccttttggaataaataaaattcaaacatctctctatggcctatctggttttacattttctgggccctgcctttctctctgaccttatgccctgttactctctcccttgttaacctgggctccatactggccttctttcagtttgacaggttaaagcttgccttttgttctataaagagggtaaggcatttcttcctacaacaaagcacattactgtatttcagataggtttatatataaatgatgaaatggtaaaataaataaaggaataaggaaaggtctttttgcaggtaacaatgtatgttttcaatgttttgtccctgaatttggctggaaaggagccctacattcctttctttgactatttattttcttggttatctctacaaagatttttgagatgcttagtcaaggagcatgaaaaaatcatcttcaggaaacattcctttttcttttgatccaccctttggccatctttcagcaatgagaatgtgagaatgtgagttttagggcagtattgttatattttggggggttccaggcagagcataatgaacaatgttaaacttcagcttatttttatgtatcatttatcataaaagaaagattcttagattttagatttaaaggaaaccttagatttcatctagttcagcttttaaaatttacagatgaagaaattaagacataaagagaaaacattatgtcctatggaatagtctttcaccctttgaaatgctcacattatattaaatcgttagccaaagaattattatcccattttacagattagaaaagtgaaaatcagagaagctgtttgcttaaggtaacttagtttgtgagaatttcagctggaaatggaacacaaatttgacattaattcccataccactttttttttttttttttttttttgagacagagtcttgctctgtcacccaggctggagtgcagtggctgatctgggctcactgcaagctccgcctcccggattcacgccattctcctgcctcagcctcccgagtagctgggactacaggcacccaccaccattcccggctaattttttatatttttagtagagacggggtttcaccgtgttagccgggatggtcttgatctcctgacctcgtgatccgaccgcctcggcctcccagagtgctgggattacaggtgtgagccaccgcacccagccccataccattttttaatgctatgttgcctctcacagaggagttgtaagctattaaagaagcaaattcacatcattagtttctaccgtatataggttttaaacgttatggtctttatttttattgtaaaaataaataattattaaatatatatatgaagtgtttcaaattgcttgagttcttgaaatattttacaatgtgtatgtgatatattttacagtgtgttattttacaataagaaaaatcaaggtaataaaaaataaaagtgatgcatgtatactagagataatttctagactagagggagaaaaactctgaaagggctattgcctctcacgactgttgttaacactttggttatttatgtctggcctatctttaatttatttgttttctttctctatagttgtactttaggtacatgcaccttaaagcaatgtaaacagtgattaatatttaagaatcaatgaattttattctttttttaatttatttatttttcttctgagacagggtctcgctctatttcccgggctggagtgcagtggcatgatcatagctcactacagcctcaaccttccagactcaagcgatcctcccacctcagcctcctgagtagctgggactcaggcatgcaccaccgcacccagctaatttttgtattttttgtagagacagtattttgccctgttgcccaggctggtctcaaactctggggctcaagcaatccacctgcattgacctcccaaagtgctgggattacaggtttgagccactgtgttgggctaaattttatacttatacttgctttcatttttacttttgagataacattgtttaccacgtaaggttattttttttttactcattgatttctcattgcagggtatggccaaaaaacaaacacaaataaaaaattcttctggaaaaaatattctggtataaatggcttaagagagtagaattatattgtggtagtcacaaacatgtggagtcttatttagaatagtaaaaagccccaaaatagtaaacatataagcccagtagccctgtaggagtaaaggattacaagtgtgtgtgtgtgcatgtgtgtgtgtgtgtacacacacatgcacacacacacgcttacatatatgtatttatttattattattatttttgaaaaggagtttcactcttgttgcccaggctggattgcaattgtgtgatctcggctcaccacaacctctgctttccggattcaagtgattctcctgtctcatccttctgagtagctgggattacaggcatgcactaccacacctgactaattttgtatttttaatagagatagggtttcaccatgttggtcaggctggtctcgaactcctgacctcaggtgatccacctgccttggcctcccaaagtgctgggattacaggcgtgagccaccatgcctggcatatacatatatacatatatatatgtatgtatgtatatatgtatataaagggtagcaacatgaccttttcttgtcacatcagctatgcacaaaggacttattattggactgcatcttaccctgaacatccaaattttactatggaactgttagctttttttttttcaggtattttttatattaaagcttagcactttatcagaactttttctcttaaaaattctttgtattgaacatttttaatagggggagagtaggtagacagatttcacacataatgcaggttttgacgtgtccaacctgaggaacagtttaacttttaaaattgttttatttttagagcaaaactccagtttcctagtatgtatttttcagctgttttttattgtcacaaagatacatagctaaagagagatcatgatacaagaagatctgaaagaagccagtacctaaagtgtctaccacagcatgaatatatactactttgttatgtgggaaaaatgtcattaacactatcaggcctttacaattacatgattgaaaatgatgatatttacatacaagtttgatttaatgttaagtgttcacataaacttttgaaggtatctttcacaataaatttatgaagtttgggggaattttgctgtagtcagttaagaattgagatttacacttagggaggcctacatgggcgcatcacttgaggtcagaagttcgagaccggcctggccaacgtagtgaaaccctatctctactaaaatacaaaaattagccaggcgtggtgacatgcgcctgtaatcccaggtacttgggaagctgaggcaggaggatcacttgaacctgaagatggaggttgcagtgagtggtgagcagagatcatgccactgcactctagcctgagccacagagtgatctccgtctcaaaagaaaaaaaaaaaaaattgagctttttaacatgtaggttgatgacattttcattcttttgtttttttcaagttttgcttcagttgtgagaccattttatttcacagccttattctctctccccttttaaaaatatttctgctagtaaggaaaagaaatcaagacttttacgaatagttttagcattggactgtagttagcttactttgtaaaatgtcattatcttcctagatttctatgtagaatttactcactaatttccataatagtagttctgagtgtccctttgaatcttcctggccccataaggaaggaatgtaaattatgttacactttctcattttgtattttcaaatgttatgctgcttccatgtctgtagaacatccttactaatagagtgccaagggagtattattacaaaacctaactttgttttgtttttttcttttctttattaattgtttttatttttactttaaatttttaaatatataaagctatggagaataatataacaaatatccatgcactcacacccagaattattaataataaagattaacattttgacattttgcttcatatttatatatatatgtatatagttacatctttgaaatagaaaatttcaataaagttgaggtcctcttttcctccgtagtcctgttttacccccctccctccacagagacaagcagagtgtaaaattcccctataccctcgcaatccacattttaatttttacctcatgtttatatccatctggttagtgtactctgtatccatttgcttagtgcgcttagtgtggtttttaaattttaataagtattctctttctgtatgtgttattccccaatttgcttttcaaccaacattctttttaagatttaggctgggtggctaatctaatggctcatgcctgtaatcccaaaactttgggaggccaacgcaggagaatcactggaggctgagagttcagtatcagcctgggcaacacagtgaaatcctgtctcataaaataatttaaaaattagccgggtgtaatggcatgctcctgtagtcccagccacttgggaggccccatctctaaaaaaaaaaaaaaaaaaaagatttgtgcatgttcatgcatgtatgattagttcatttatgaaaatgccacaatttatctattcttctattaatatgtatttggattgtttttgttttctccttggcgtatagttgctacttttggtatgtaatcagattaaccagcaaggatttattgagccactaatcttgtatcccacctttccctaaggagcttacaatctagtaggggacacaattcatagacatggcagtatagaaatcaggtggggtagaaattaactctatccaatccctattagtttttctttttcttatgatctttttgttgcaggcatgatttttgaaagttacttggctttcaaggtaaatctttaacttttaaaaataatttgcttcttttaggtgcttgtttaaactgccaggaaaatagcaaaggaaatcactgtgaagaatgtaaagaaggattttatcagagtcctgatgccactaaagaatgtcttcgctgcccttgttcagcagtgacatctacaggcagctgctctataagtaaggcctttctctaacttttcattttagagggaaaaaaaaatcagttatcaataggtataagttgcattgatgaataaagttctggatgctataggtgaaagggagttataaaaacagcaaaagttttcctttccaggaatttataatctaatccaaatatatatatatgtgaatgagacttaaagtgtctaaaaacctgcataatgagttaatgcaggaacttcaagactgagcaacttttgctcacctatttcaaggtaacatttactaattagttcctcctagataccgaataatgttgactaattgcaatctaataaatatagttgactcatttaatcctgatatatatattagttatctattgctaaataacctattaccctaaaatttagtggcttaaaacagtaagcattcattatttcacatattttctactaggactttcgaagcagcttagctgggtggtgctggtttgaattttttcctttctttctttctttctttctctctctctctctctctctttcttccttccttccttccttccttccttcctttctttcttttcttttcttttctttctttctttcctttcttttctccctgtctgtttaaataatagctttgttgagctgtaattcacatttcatacaatttaagatgcaaaattcagtttttttagtacatagtctcaaagttttgcaaccatgaccacaatcaattttagaagttttcatcacctcccccaacaaaaggacctaaaaaacaatcctataatcattagcaattactcccttttcctctggccttaggcaaccactaacctactttttctgctctatggatttgcccattctgaacatttcatacaaatgaagtcattcaatacatggccttgtgtgtctggcttttttcacttagcatagtattttcagttcattcatgttataacatgtctcagtacttcattcctttttgttactaaataatatattattgtgttataccccatttcattgctctcttcatcaattgatagacatttgtgttgtttccactttttagctattacaaataatgctgctgtgaacatttgtatacatgtttttgtatgtacatatattttcatttatcttcagtgtatacctaggagtggaattcctgggtcctgtagtaactatgtttatcctcttgaggagctgtcagactgttttccaaaatgagtacaccattttgcattctcattctcaccaaccctgtatgtaggttccaaattttccacagcttcaccaacacttactatctgcctttgtataattatagccatcctagtagatatgaagtggtattccactgtggttttaagttgcatgttcctgatggctagttatgtgcttattgttcattcatatatttagagaaatgtctgttcagatcctttgcacatttaaaatttggattatttatcttgttatcattgagttgaaataattctttatatattctagatacaagtcccttaacagatatatgatttataaatattttttctattttgtggtttaattttttgctttcttgatggtgaccttcttagcaaggcccaattcaaatgttacctgcttcatgaagacttttctatacctcccagtaggaaattatcctgtccctcaagctctcgtactacagtgcaatatcatgtatttatgtatagtggatgcaccaagagggaataattactttgcctggagtgggggaatatcagcaatggcttcagagaggatgtgacataaaagctgagtctcgtgatgggagtctgcatttagcaggtagacaggagaaggaaggacatttcagataaaaatatcagtaggaacaatggtacagaaatcttaaaacagcttatttgatcaagaaactacttaagaatggcagaaacaaagtataaggcagaaggagtgaaacatcaggcagcacattgaatgtcatatttgaggtccagttggtctgcccatgacaggcatgaaaggctttcacaaaccttaatttcagtccttcagtctatttcatcaggaattctttagattattgttgctatagttgttgaagtacaaaaatgctgtaaaatatggtactgttgtaagctgtaacttcattgagaacaaggaatatatgccttttcactaagaatttttttcctgcatattattgtttgcatgggttatgaataattcagctgccaccttttattgctgaaagtaacctaagtatttctggtttaattcctttatttgaaatatggaaagctgaggcccagagtttagtaacttacttgagatcacactacccactaggattgtaagtggtaagttagaattctttatcagttgcacactctgggaatatactaaaaccattgaattgtatacttttaatggttgaatgttacggtatataaattatatctcaaagccattttaaaaagtaaaagtgaaagatgaaaggaattcgtttttcttaaagagcatcagaaatatgattcattgccacaagttccatgaccactgtaaagtattcctgctataataacattagtctgtgtttagataacagggtgatcctgttagtgtaattataatagtaaattctaaggaaagaactaatctatctagcagatttaaaagatgacttgttgattattaaaaattatttattaaatataattaagaatccagaattgaaatcctatgaagaataaaaaaggaaacagataggtatgagttgttatgttcctactgcctaaagtgaaattactcagtagatacatattgaacacgtgctatgttttaggcactgtgctaaacattggcgataaagacagaaaaatgtcaaatagctcatagtttaatgggagaaacacacaagtaactaggtaattacaatttcaaatgacatgtgttacagttaagcatagactaaccctatcctaaactgagggaatcaaggaaaacttctgtgcttctgagaagaagtaatacctgagttaattcctacagattgaatttgctaactgaactagaaagagagacaagaggatgtcccatgcagagaaagtagtatgtacaaaacctcagacagaagaaagcaggcagtatttgggtatttgggagttcttttaagccatttaatgtgcctgaaccttagggggtggtggagtgtgaagtgaagagagaaaagttgagagaagtaggcagaggtcagattatgaaaagtactaaaaattctattacgttttcacttaatcctgaaggagttagggaaccattgaagagatttctctagagaagtaacatattcttatttactttgaagttcaaagtgaatgtaggggtgcattgtgataaaaagaaccatgaggaagtagctacaataatctaggtgagaaatgatgaaggcttaatctaagatcactccagtgggaatggaaagagacatccgtggattggaaagactttaatcaggtacaattaatatgaattgataactgcttagaagggacatatggaggaagaggattgagagatgattctcagtgttttggcttatgcaagtgggtagatgttggtaccattcactgagatctagggaacattggaggaagacaggactcaggaagggaagatactgaggacagtgttgtacatgttaagtttgagatgtttgtggatccaggtgtacaggaagttagtatatagtttggaatttaggacagagatgtagactagagatacacatacacatattggaattgttgatgatgtcagtggatgaggccacccatggaaaatgagcagagaagagaaagaaaccaagaatagaagtctgcagagtacccacatttaagtttgggagggatggaggaagtttttgttaaaacaatattttatccaatctgtcatctataaaaagaagggaataacacaattatgagagtgccaacccatcataatcattcagactccttatgtaagcctatttattttgctctctacatgaataggttctctggatggccccatcattcctacaataagctggaaaattagtaaatagattatagattattagtttaattaattaatagagattattatatgtctctagagaggagacagtagggaaggtttataaaaaacaaattagaaacagggtctcatcatgttgcccaggctggtctcaaactcctgggctcaagcgatccttccaccttggcctccaaagttctgggattataaatctttttaaggactagtagttgttttgcatttttaattgtagcttcagactgtactaaactattttggcattctctcttttagaatcgagtgaattggaacctgaatgtgaccagtgtaaagatggttacataggcccgaactgcaataaatgtgaaaatggctattacaattttgacagcatctgtagaaagtgccaatgtcacggccatgtggacccagttaaaactccaaagatttgtaagcccgagagtggtgagtgcatcaactgcctccataacaccactgggttttggtgtgagaactgcctagaaggttatgttcacgacctcgagggaaattgcatcaagaaaggtaaaacttcacctaagtgattgtaaatttaatatctaaaactagcagtgaaaaatggaaggctttgtaaaaccttctaaccctaccagaggagtttctggaaatagattttgatagatatttgcctaaagaggtttccttccattcctgctgctcttctgacactccacagtcaactccagaaatttgaggaccaagacaaagtcattgcgacagtgagacaaaatgttctcacatttttctcttcatctatttttatttttatgttaataatttaagaatcctatcatttcttttattctttgcttcctttattctcatcactttgagggatcatcaaaggtcttttgaagtagggacatctaatctggttagaagttccagctgagaagctggagttcattctagcatctgtcctaactttgggcctaagtttccccatgtacaatggaggaaataataatattccttttgaattttaaaagcaaaagttatccacatggcaaaatatttcttataggaaagctcagtaattaaaattaatgattatgaattcaggatgagttaggatattgagggtttattaggtcacagagagattggaccatgctgttctacaaaccactctttgatattcttaacatgctgaacacgaggctgatgaacagttggtctatggcaactgtcatctttctgccattttcttgatatctttatactgtagtgatcaaggcaaaaagattcagattgaaccctattactagctagagatcctgctactcagttctcttacctatttgggaggcacactttgtccatagttagctgacagaactgatgatttttcttattagctaataggtaatatatataaactttgcctctttttagaataaattgatatggctttcatggtgaagaattataataataatagtaatacttttattgagtacctactatatgccaagcaccgtaagcattaaatgtgataatgctgtgtagtatattatttcatttaatccttcccaagaactcagcaaagttgatgttattattcacattttacagataaggaaaccgagctttaaaaaaatttacttatctgtagccacacacttctatttgattccaaagcctttagtccttccaccaaactatgctgccattagaaatacaaagtataatacctaaattataaagtagctgtaatctacacaaaggaagaattcctacacatggaattaaggaaagctgttttctctcttggctgatgtcagcctcagacatttaaaatttgtttttcagacataactagaggtatagttttccctacacctcctttgcagataattattttacctttatgaaatgccatcagacttgttagacttatttttgttcaaatgattgccatatatccctgttacttttaactatgtgatttagagctcagtagtgacaaatttactgcctttgcaggaatttatatgattttatctaagagtaaataagaatggaaaactccaacactggtattttcccaaagattttttttttttttttttttgagacagagtctcgctctgtcaccgaggctggagtgcagtggcatgatctcagctcactgcaacctctgcctcccagcttcaaacagttctctgcctcagcctctcgagtagctgggattacaggcacccgccaccacgcccagctaattttttgtattttcagtagagacaggtttcaccatcttggccaggctggtcttgaactcctgacctcgtgatccaccaccctcggccgcccaaagtgctgggattacaggtgtgagccaccacgcccggcccaaagattttaatgtagatattatacatattggaaaacagccatagatgtaataatctagctttctagaccctgattcttacccttatcactatatttctttaaacattatttttaacttgcattaccttaaagcagaatatcatgttaacatcctacatcaacattcactcccatgcgtatttcttttattgtttctcaaaactagataattttgtcttttacatttcattctctgtttttattttcagaagttattcttccaacacctgaaggttctaccattttggtttccaatgcctctttgaccacatcagtgcccacccctgttataaatagtacttttacccctacaaccctgcagactatcttttcagtaagcacttctgaaaacagcacttcagctttagctgatgtatcatggacccaatttaacatcatcattttgacagtcatcatcattgttgtggtgctgctaatgggatttgtgggggctgtatatatgtaccgcgagtaccaaaaccggaaactcaatgcccccttttggaccatcgagctgaaagaagacaatatcagtttcagcagctaccatgacagcattcccaatgcagatgtttcgggattgttggaagatgatggcaatgaagtggctcccaatgggcagctgaccctgacgacgcccatacataactacaaagcctaaggagctagaactgttctgaattgttaaaccacagtgcttgctaagacagagtcagcccctgggccagacaaagcctggctagagtttgctgagaaagcaaaggcaaatagtgcatctgaaattttcaggtacaaatttgtaatgcgcttagcctatctattgctcttagttttcccatgaagatctgaagcgttcactgtcattaggacttgaagtaaagtatatttttgtaccaaaccacatgggagtatggaaaggctgaaccccatagtgcagcccaaaaccactttgacctccagatagactcctggggaagcattcaccaagccagtggtaacaagatgatgaatgtggagggggaaaagactgctggaagacttcatctccattcctgaaacattttttttaaaacagtgtcagggattatattcgttttactatacaaaaggacatcattgaggaaaagcttgtttctaggctgtatcacagtaaataatcttgattgtttctagaacaggggtagaaaagtcccaagatcttcagaagggcttggttttttcctcccaggattcttgctcagtgatgagttgaaagcacaggataagcttctaagggaggaaggcagcattggggagcaggaggctgatggtcctcctcagggtctcagtgtaaatgataaattgtctaaaaataaggaatattcctgcctctagagaaataaggtgtacatagttaatgtagcatatctggtcgacgttgtatttgtatctatttgtaaaaaaaaaatcatgtcatattttatcatctggaatttatttgtacagcagttaatggtgttgtaaaaagaaaaatatggggattgcttaaaatactgtaaaatagatggcaatattgctagagctgggactctggtgagcatccgtcatttttagtccttcttgaggacattgctgaaatttataagaggtcgaatgtttctttctttcctttctcagtctaaaagtagagttatatgctctttgacttactatgattcaagcaatagattttgaagtcagtaatcgttaagctgggacataggatgcattctccaaaaacattaatctaattagacattagccaccctatatattttacatagattaatataaaacatatcctcattaaaaaatgtttttcttgaatgtaaaagatagtcttccaaaggatagaaatattttagttccaagagaaaagccatcatattacttgggatctgtagttttcatgcctatgaaatatttataatcctccctcaccccaaataaaaaatctcctacatgtgaacatagcctgtcactcatttgccatgaggtatgtgccatctccctgcagtgctatagttctcccattgtcttcctgtctggttaatgagcagctttgtagatgggtgtgtctagttagttcttgctttttgatggagttttttcctagaggccaactactgttgctctcgtttattatgatattgacattttgggttaagcaaggtgggtgggaaaggtggtcagatgttaaatataacttattaggaggaacagtgaactgtgaagtggttagaaaaaaaataaaaacttcttattagattagacctaggaaattcaagctgacccctttgcctaacttccctagagaaaaacctagaacttggtcatccctttataggagacccctaagttgttctcagggtttggagatgatgttctggagggagtacaagcaaataatctacttctggtaatctgagggtgctttgcgtatttggccattgctcagaagaatagaggttacattatattacattatatgaaaattatttagtttttctatagccctttgtagtttgcaaagcacttttccatatgtgtgtcctctcttccacaccatagccccctgaggaagtaattgttgtccccattttatagatgaaaaggctgaggcacagaggagctaaatatcttgttcaaggctatacaatgtgtgtgattattaggcttggaatcagggcctctaactctaaagcacatgttttttcaactatatgcagaaattgcctagccatggacacaagaaagctgggaggaagagttctacttgtggatgtttttaattttttttaaatatcaggagcaatccagggccatacagctatgaagcacttagtgaaaagaacacaagaagatttactaactgaagttagtattagtgattagaaaacaaaactgccagtttgtgcttcattaaggtgaactcatctctccaagcaggaagggaaaatttgctttccctagcagttgctgcatatgtgtgtacagactgcacaattctaagaaattgtgcaaaatggcatacctgtctttctcccagatacaccgccccctgccccccccaaaaaaggtcaggattaaaggtggtgagaagtgaacatttattaaacagaagttaaaccaatagagagaaaggaggtttgttggagtctaagaggattttgaccatgtagaaattccttgaaacagaccttaaaaggtattgaaaaattgaatcacaaagaaagtttacctttaaatacttgttaatggctcctagatcatggttataatttttctcaatgggaaaaaaagtcttaaaatttgttttaaataagatcctctaatgtctcgagctttttgattctggaaataatttgctttaaaatataaatcaatcagaaagtgatctaccactgaaatcattctaggaaactagcatgggatgcactgcacaatgttctttcctctaaaggcatgggccccataaactgtggcatctggcagcaggatgccatcagtcctttagaaagcctaattttgggccgggtgcggtggctcacgcctgtaatcccagcactttgggaggccgaggcgggtggatcacaaggtcaggagttcgagaccagcctggtcaacatggcgaaatcccgtctctactaaaaacacaaaaattagccgggtgtacgtgcctgtagtctcagctacttgggaggctgaggcaggagaatcacttgaacctgggaggcagaggttacagtgagccgagatggcgccatttcactccagcctgggcgacagagcaagactctgtctcaaaaaaaaggaagaaaaagaaagcctaatattgggagaatgtttgtgtaaggattggaaatctgtttatttttaaataagatagcactgatgtgaatcttatttggaaattacagatactgccattaagcgatgcttttatcttcattaattcattttggtaagcgcctatgcatttctgatggttaggtgccctaggtagtgttaagtatgtccgtgtcctcccttactcccctctcgctccctctaccctctatcccctagggttcttttattaatggaatttctccagttatagagaaaaaaatgacatttgaaaactaaagctcatttatattaatactaaggtcctgtgggcctagtgcgttactcttcccagtgatacctagattttaagagtagagaacagaggaaacatgggatgagaggagagaggttttttagacaacatttgtagacacctcaaattatatcactgttctctagcgccaatattcccaggtaaattgaccattaaagcaatactcactgacctactagtttattttggtcagctgagtaccatcaggatatttaaccctttaagtgctgttttgggagtagaaaactaaagcaacaatacttcctcttgacagctttgattggaatggggttattagatcattcaccttggtcctacactttttaggatgcttggtgaacataacaccacttataatgaacatccctggttcctatattttgggctatgtgggtaggaattgttacttgttactgcagcagcagccctagaaagtaagcccagggcttcagatctaagttagtccaaaagctaaatgatttaaagtcaagttgtaatgctaggcataagcactctataatacattaaattataggccgagcaattagggaatgtttctgaaacattaaacttgtatttatgtcactaaaattctaacacaaacttaaaaaatgtgtctcatacatatgctgtactaggcttcatcatgcatttctaaatttgtgtatgatttgaatatatgaaagaatttatacaagagtgttatttaaaattattaaaaataaatgtatataatttgtacctattgtagatttgttgtttacttttttgtgtggtcagagttgtttcatgtcttcaaatacatgccaaggatcatttactttcagcccacttcataaaaatctttgaactcttcatttattggccatgtattttgtttaagttcatttaaagaatgttttctacttggggggaaaaaaatccatgaagaagattccctctcttagaggaaaacaaaacctgagaagaaaatatattaacatatatttttgtttgtgcttttgcctattccctctgacatccgtcggattttatagagaaaacttgctcgctttggatttctttgtcacacatataaagaatttcctttctttggtagaaatctgaagagaaaccatattctacctgtttattaagtaacttgtaatgagagtacatctttttaatattttaagctactcttgaagaacctgtattttgacaaagctagatggtgtttaatgggatgccatctgagagattcctttatttgaaaaaaaagaaaaagtcaggcatttctttgtgctgagagctttataaacttaaactgttttattcaacttcagttggttaacatttaaatttttaaactctattttttcttttctagccacacaagaaaacaggttttatcactttataataacaccttatgtttatacatgtggttctgtgatgtatatgaattgggtattaagggaaaagaataagcatggcagaaatctaaacaaattacagtttcaagagaaagtatatatatacaaacaagtaaggacatttgcgaggttgcattatcaaaactggttgtattcattttccataggagtataaaacatctatgttttaaaaaaattccacatgctccattataattaagtcagtaacttcaaagtaacagtgtgcttacttatattttaaaagttaagctgaattggccgggcgcggtggctcacgcttgtaatcccagcactttgggaggccgatgcgggtggatcacgaggtcaggagatcgagaccatcctggctaacacggtgaaaccccgtctctactaaaaatacaaaaaaattagccgggcgtggtggtgggcgcctgtagtcccagctactcgggaggctgaggcaggagaatggcgtgaacccgggaggcagagcttgcagtgagccgagattgcgccactgcactcccgcctcggccacagagcgagacttcgtctcaaaaaaaaaaaaaaaagttaagctgaattaaaaacgtttttcatgagatgatagcattaggagtgttgacaggctgaaaatcaacattctatctaaatcaatgttaaaattgcagttttacctataagttagtctttcaaggcaattttatgaggaattattgtagtaattgtacaggctttctagtacttccgtgtacaaaatgaaagccatcagacaatgttaaatttacaatgtgctgcttgtttgtattaataataagtagattttaaaccttgtctgttgaatggaacactgcacttcaaacagttgcaaaagaaaacaggcaaaatgttttctttgtatgtaataagagtaggtttgggtaataaaagaagtatttgggaggaaatcttcttttgtggtttcctttgtgttgttagacaaactgctgaaattgtatatgtcagtattggttctttcaatctttgacccaaagaaggaaaagtctcagctcttgccacgttaattactattccaattcaaccatgttaaactcatacaatttcctacatatgccaggttatatgatgtcttcctcctttgctggtactgtttcccctacctataatatccttgagaatgctcattcattctttgcaaacctttgataaaggaaagttgatcaattcttaaatttgtacctccattttgcctaatgaatacttctactactgcatatattttattataaatacttgttagtttgtgccttccccagtgaactctgtattccttgaaattaggagcgtttattcttctgcctctggcatctggcatgttgctggtacattgtgggtgctcagtaagtgatggtttatgtacaaaaggtagttgacaatacaagagttggtatgtgaacttatttgttgaagtatggcaacaaaacttctattcagtggatacgataatatttcttattcaagagaggtgtcaattttacataggcttcagaggttctgagaaacccttgaaatttcatgccgttttgtttattgatgcaattgtgtttctttttttctggagagaagacccatactttaatcattgtctcaaaaggatccatgatcggcccggcacagtggctcatgcctgtaatcccagcattttgggagaccgagatgggtggatcacctgaggtcaggagttcgagaccagcctggccaacatggtgaaaccccatctctactaaaatacaaaattaagccaggcatggtggcgggtgcctgtgatctcacttactcagggggctgaggcaggaaaattgcttgaacctgggaggcggagtttgcagtgagccgagtttgtgccagtgcactccagcctgggtgacagagcaagactctgtctccaaaaaaaaaaaaaaaaaaaaaaaaaagatacatgatccccaaaggataaacaactaattgaaggattattacttcatttttcagcaatcaaaatcctcccactgaatgcaaattggcacaattggtaaattggtctttatttcaggaagtccacttctaggaaatcttcataaggaaatgacctaaaaagcagaggctccacaaaattttttttcagactggtgtataaagtttcaaaacttgggaataaattctagatgttcaagaacagagatgtagcctggcacggtggctcacacctgtaatcccagtactttgggaggctgaggcaggtggatcacttgaggtcaggagttcgagactagcctgaccaacatggcgaaaccccgtctctactaaaaatacaaaaattagccaggtctggtggcgcatgcttgtaatcccagctacttgggaggctgaggcagaatggcttgaacctgggaggtggaggttgcagtgagccgagatcatgccattgcactccagcctgggagacagagtgagacgccttctcaaaaaaaaaaaaaaaaaagaatagagatgtagtttagtgcatatacttcatgagataacatacagtcactaagagggattagggagaattattaaaaactgaatcaaagttaaatgaagaaaaatggtttgttttgaagatgtgcatgtaatttcactcctggtatatagtttagagaaactcatatatgtgcaccagaagctgcatttcaaattcttcactgcagcattatttattatagcaaaataattggaaacagtccaaatgtctgtcagtagaagaactgtggtctatccatatactttgaacagaattttatgcagccgtggaaaatgaatgaattacagctatatacatcaatgtggatgaatcacaaaaacaatgttgagcaaaaaaaagtaagtcatagaggccaagtatgtaatcccagcactttgggaggccgaggtgggcagatcacttgaggtaaggagttcgagaccagcctggccaacatggtgaaaccccatctctactaaaaataccaaaattagccaggcgtggtggcaggcacctgcaatcccggctactcgggaggctgaggcaggagaatcgcttgaacctggaaggcagaggttgcagtgagccgagatcatgccactgcactccagcctgggtgacagagtgagactctgtctcaaaaaaaaaagaaaaattagcactttgaactgaatgaaaatgaaacaacatttcaaaattgtggaatgcagctaaagcagtatttagagaaaagctcagaatgtctatattacaaaaaagacttcaaattaatgacgtaagcttctatcttaaaaagctagaaaacgaagagcaaaataaacccaaagtatgcagttaggaaataacaaagacaagagcaaaaataaaatagaaaacataaaatgaaaaacagagctaaaagctagatctttgagaaattcaataaaatttatagacttccagacagatagataatcagaaaaattaagaaaacacacacacacacacacacacacacacaaaaacagtaccaggaatgagagaggggaaatcactatacatcccataaacattaaaaggataataaaggggccaggcatggtggctcatgcctgtaatcccagcacgttgggtgaccgaggtggggggatcacttgaggtcagcagtttgagagaccagcctggccaacatggtgaaactccgactctcctaaaaaaatacaaaaattagctaggcatagcacctgtagttccagctaaacgagaggctgaggaatgagaattcgcttgaacctgggtggccgaggttgcagtgagccgagattgctccacttcactccagtctgggtgacagaacagagcaagaccccgtctaaaaaaaaggataataaaggaagtttatgccaacaaatttgatgacttacgtgaaatgtacatattccttcaaagacacaaaccatgctcactcaaaaagaaatagataacctaagtagtcatgttacctttatttaatttaatttgtagttaaaaactatttgtttgtttatttatttatttttgagatggagtcttgctctgtcgcccaggctggagtgcaatggtgcgatctcagctccctgcaacctctgcctcctgggttcaagcaattctcctgcctcagcctcccaagtagtaggattacaggtgcgcgccacagtgcctggctaatttttgtattttttgtagtagagacggggtttcaccacgcttgccaggctagtctcgaactcctgacctcgtaatctgcccgccttggcctaccaaagtgttgggattacagtcatgagccacaccgtacctggcctgtagttaaaaacctttcacaggctatgtgtagtggctcacactgtaataccagcacactgagaggccaaggcaagaggactgcttgagcccaggagtttgaggccagcctgggcaacaaagtgagaccccgtctgtacaaaaaaaaaaagaaagaaagaaaaaaagaaaaattagccatgtgtgctggtatatgcctgtagtcccagctatttgggaagttgaggtgggaggatcacttgagcccagcattttgaggctgcagtgagccgaggctgcaccactgcactctatcctgggcaacacagtgagaccctgtctccgaataaacaaaaaacaaacctttcacaaagaaaactccaggtccagatagcttcactggtgaactctagaaatatttaaagaaatattaccaattctacacaaacccttccagaaaaactaaagaagcaatatttgtcaactcattctatgaaaccagcattacccaaataaaaaaagaagacataacaagaaaacaacagaccaatgtctctcatgaatatagagagaaacatttctaagaaaattcaagcaaatttaagtacaacaatacactttaaaaaacagtacttcaaggctgggcgtggtggcttctgcctgtaatcttagcactttgggaggccaaggcgggcggatcacccgaggtcaggacttcgagaccagcctggccaacatggcaaaaccccgtctctactacaaaaaatacaaaaattagccaggcgtggtggcgcatgcctgtaatcccagctatgtgggaggctgaggcaggagaattgcttgaacccagggggtggaggttgcaccactgcactccagcctgggtgacagagcaagactctgactcacacacacacacacacgcacaaatagtacttcattaccaactggggtttatcacataaatgtaagtttggtataacatttaaaaatcaatcagtgtaattcacaaaggctgagaaagaaaaataatatgatgattacttcaatagctgtacaaaaggcatttggcaaaatccaatattcattcatgataaaaatgatgatgatgatgatactctcttgtgtattgtgatataataagaaatataggctgggcacagtggctcacgcctgtaatcccagcactttgggaggccgaggtgggtggatcacttgcggtcaggagtttgagaccagcatggcccaacatggcgaaaccctgtctccactaaaaatacaaaaaaaatggcctggcatggtggtgaatgcctgtgatcccagctacttgggaggctgaggcaggagaatcatttgaacccaggagatggaggctgcagtgagctgagattgcgccactgcactctagcctgggcaacagagcgaaaccctgtctcaaaaaaaaaaaaaaaagaaatatatatttgggtctttgtctagctcccagcttttgtgcaagtttctaaatgataagagctgtagtagcatcttaagttatatttggtttttgcccctggctcttgtaataggtccagggtgataaaggtgaaaggaacaacttttgttacttatcataagtccctgttgaccacacctgagttattgaagtgactttggaaaagcccctcaagatgagggtgctggttgccagaggaatcaactgtatgtttggaagattgaaacgtttagcccaggaggttttttcttttgtttgtttatagagaggttctcactctgttgcccaggcaggagtgcaatggtgtgaccttggctcactgcagccttgacctcccaggcacaagtgttcctcccgcctcagcttcctgagtagctgggattacaagtggatggactataagtggacaccagtacacccaaataatttttatttttttttagagacagagtcttgctatgctgctagggctggtcttgaactcctgagctcaagcaatcctcctgccttggcctcccaaactgctgggattataggcatgagccactgtgcccagctaaggccagaaggtccaggctgcagtaagtcattatcttgtcactgcattccagcctgggcaacagagtgaggccctgtctctctctctctcacacacacatacacacacagacacacacacacacccctcactatatgttagtaaatgaataagtgaatcagccgtatcacagtttctacactcataagtacaataaaggtgtgtaagtatactgcagtctgcaggctttgaattagtgcaaacttaaaccaaaatcccaataaactgttattttggaaagcatcaagtcacttgtaagtagggatgtttgtgagtgaccctgggaacatacagcacaaaattcccttcgatggaatggtgctgatgaagctcattccttcggtgtagagagagatcacgcccacagacctgactgcatgtcctcaaacactgcggcctgtgctgactgagtaggaagcaaacatagtccaatatatggatgcttttggtgtcctccccttcctgcctttacttttactccagaaccaacaggcttcatctcagctttttaatttccccaaaacattttctaaatgagccattgttatctttaatcaccatggctaggggggattatccagcctcgtttgaagaagctattttttgcaaagagatgagatccttccagacaaggataaagacattaatgttgtctattaagattctgctttactcaagataataattttagggtaaattaaggaaattgtatagacgccaatgggccattaatccccagtggaattgtctgaaatggagaggcctttaaatttggaaacaaggaatttggcaacagttacattttgaatttccttcagttaaaatgaaaaggtttcaatgttaacaggtactgtcctgggtaaagaattttatttagttacaatctgtatctcaactttttgtattaaaaggtagagatcattaaacctttgaattaagagttaaagtatcagttaagtatactaaggaggaagcagaaacataccagaaaacctaggctaaaggctaagttagcaaatggcacccagttgagctatgagctgcccaacaaacagcaacatagattatttacctgtattactgtctaattaaaaggtgcatactggaacatcaacataaaatctatttttcttggttctaaaagataatagcttatggtacaaaaagcatcagctttgaaagtgatatggacaggagacagggaaatactgagtagaagagagcggtccccggcaaaggccccaccctcaagcctggagacctgcagccctaagtgggaacaggcatttctgttttcgtgcccaaaaagttgcctttttgcccaccacaccccctatcttgtacccatataaaccccgaactccaggctccggaagcagacaagcaggggaggagatgagataggcagaggaactgcggaatgatgcaacagagaaagagagacgaagaggaacatctgaatgcccagaggagtttggctgggggtggtcagagaggagttcggccactggatgggcaggctccaggggaatatcatcttcctattccattcccccttccagctccccatccatccctctaaaaaccacctccaccactcaataaaaccccacattcatccttcaagcccatgtgtgacccgattcttccaggatgctaggcaagagctcacaatacagaaagctatcacactggccctctgcccttatgaaaaggcagagggtccattgagcggtttaacactcaagccgtctacagataggagggctaaaagggcacactgtaacacatgcccacttgggttcctgcaactgcctgtctgtgtgttcccccttccctcgggggtttgagcagtggcagtgacaggcaagccacacttgccttcacacgtcctgtgagagggattggggaaccctcccatttcaaaagcagagagatatgggttctagtgcaggcctcacaactgtaggatctggggcaacttaacagatggctcttcgtcttgtcgccattacctataaaagtaataactttttagttatcactaaacatggggtttcgccatgtcgctcaggctggtcttgatgctgacctcttagggttgcagcgaggttaagtgaaaaccttatgtggagcatcgcagcacatgcaaggtctataatgaatagttcgcttcctctctccctattatttaagaggtctttaggctgggtgcggtggctcatgcctgtaatcccagcattttgggaggccgaggcaggtggatcacaaggtcaggagttcaagaccagcctggccaagatggtgaaaccctgtctctactgaaaatacaaaaatgagccgggtgtgctgataatgcgcctgtaatcccagctacccgggaggctgaggcaggagaatcgcttgaacccgggaggcagaggttgcagtgagccgagatcgtgccattgcactccagcctgagtgacaagagagaaactccgtctaaaaaaaaaaaaagaggttttaaataaaaactttacaaaaaatgcaatgtttttctatctctagtgagtggataattggatcaggtaccagctagtttgcttcctgactagaaaaccaatctacagcccagtatttgagtaaggctactcttgggttttgggtatacttaaatgaaatgagacacctccctaagttgaattgctgctgtttctgtgttttcagtgagtggtctgtggccaggacggcatccacaggaggctgaaagaagcaaagtgacatgttgttggcattctatggttccacagggatccatgaagaaacgccatatttgcctatgggaaatgggtgggaaactggtattgtgaagcgaggagagcacaggcctggaagtctgcccattttgggtctattcttgctctgttatgcacttgtagagtgaacttgggcaggccgctgaatccatctggatctcagtttttccactggtaaatccaagaagtttcgttaaatgttct

SEQ ID NO: 806 - DNA, 6342 bp, Homo sapiens
atggtgcgcccggtggcggtggcggcggcggttgcggaggcttccttgggcgacggctcccacggcccaggccccgaggaccgggcccccgcgcgccaccgtccaccgacccctggctgcgacttctccagcccagtccccggagaccacccctctttgggcgactgctggaccctcttccaccacctttcaggcgccgctcggcccctcgccgaccacccctccggcggcggaacgcacttcgaccacctctcaggcgccgaccagacccgcgccgaccaccctttcgacgaccactggcccggcgccgaccacccctgtagcgaccaccgtaccggcgcccacgactccccggaccccgacccccgatctccccagcagcagcaacagcagcgtcctccccaccccacctgccaccgaggccccctcttcgcctcctccagaatggcccaggtcaagctagaattatcctgtgtcatgttgccagttacagcagtaatggtactgctcagaactggactaaatagaagacattttaaaaaggcaaatgcaaagatggaaatccccaaaacagccattgtccagttctggttagttatctctcagatcagacaaaggagcagctgttattcaactatagatccaactagattcgaatatgttttccaactagattacatcctacagctgaaaagcaagtacttgcctcttacacagccagtcatgaatcttagagtctcagaagctgttaaaacggagtatgtatgtaactgctctgtggttggaagcctgaatgtgaatcgctgcaaccagaccacagggcagtgtgagtgtcggccaggttatcaggggcttcactgtgaaacctgcaaagagggcttttacctaaattacacttctgggctctgtcagccatgtgactgtagtccacatggagctctcagcataccgtgcaacagttctgggaaatgccagtgcaaagtgggtgtcattggctctatatgtgaccgatgccaagatggatattatggctttagtaagaatggctgcttgccctgccaatgcaataatcggtctgccagttgcgatgccctcacaggtgcttgtttaaactgccaggaaaatagcaaaggaaatcactgtgaagaatgtaaagaaggattttatcagagtcctgatgccactaaagaatgtcttcgctgcccttgttcagcagtgacatctacaggcagctgctctataaaatcgagtgaattggaacctgaatgtgaccagtgtaaagatggttacataggcccgaactgcaataaatgtgaaaatggctattacaattttgacagcatctgtagaaagtgccaatgtcacggccatgtggacccagttaaaactccaaagatttgtaagcccgagagtggtgagtgcatcaactgcctccataacaccactgggttttggtgtgagaactgcctagaaggttatgttcacgacctcgagggaaattgcatcaagaaagaagttattcttccaacacctgaaggttctaccattttggtttccaatgcctctttgaccacatcagtgcccacccctgttataaatagtacttttacccctacaaccctgcagactatcttttcagtaagcacttctgaaaacagcacttcagctttagctgatgtatcatggacccaatttaacatcatcattttgacagtcatcatcattgttgtggtgctgctaatgggatttgtgggggctgtatatatgtaccgcgagtaccaaaaccggaaactcaatgcccccttttggaccatcgagctgaaagaagacaatatcagtttcagcagctaccatgacagcattcccaatgcagatgtttcgggattgttggaagatgatggcaatgaagtggctcccaatgggcagctgaccctgacgacgcccatacataactacaaagcctaaggagctagaactgttctgaattgttaaaccacagtgcttgctaagacagagtcagcccctgggccagacaaagcctggctagagtttgctgagaaagcaaaggcaaatagtgcatctgaaattttcaggtacaaatttgtaatgcgcttagcctatctattgctcttagttttcccatgaagatctgaagcgttcactgtcattaggacttgaagtaaagtatatttttgtaccaaaccacatgggagtatggaaaggctgaaccccatagtgcagcccaaaaccactttgacctccagatagactcctggggaagcattcaccaagccagtggtaacaagatgatgaatgtggagggggaaaagactgctggaagacttcatctccattcctgaaacattttttttaaaacagtgtcagggattatattcgttttactatacaaaaggacatcattgaggaaaagcttgtttctaggctgtatcacagtaaataatcttgattgtttctagaacaggggtagaaaagtcccaagatcttcagaagggcttggttttttcctcccaggattcttgctcagtgatgagttgaaagcacaggataagcttctaagggaggaaggcagcattggggagcaggaggctgatggtcctcctcagggtctcagtgtaaatgataaattgtctaaaaataaggaatattcctgcctctagagaaataaggtgtacatagttaatgtagcatatctggtcgacgttgtatttgtatctatttgtaaaaaaaaaatcatgtcatattttatcatctggaatttatttgtacagcagttaatggtgttgtaaaaagaaaaatatggggattgcttaaaatactgtaaaatagatggcaatattgctagagctgggactctggtgagcatccgtcatttttagtccttcttgaggacattgctgaaatttataagaggtcgaatgtttctttctttcctttctcagtctaaaagtagagttatatgctctttgacttactatgattcaagcaatagattttgaagtcagtaatcgttaagctgggacataggatgcattctccaaaaacattaatctaattagacattagccaccctatatattttacatagattaatataaaacatatcctcattaaaaaatgtttttcttgaatgtaaaagatagtcttccaaaggatagaaatattttagttccaagagaaaagccatcatattacttgggatctgtagttttcatgcctatgaaatatttataatcctccctcaccccaaataaaaaatctcctacatgtgaacatagcctgtcactcatttgccatgaggtatgtgccatctccctgcagtgctatagttctcccattgtcttcctgtctggttaatgagcagctttgtagatgggtgtgtctagttagttcttgctttttgatggagttttttcctagaggccaactactgttgctctcgtttattatgatattgacattttgggttaagcaaggtgggtgggaaaggtggtcagatgttaaatataacttattaggaggaacagtgaactgtgaagtggttagaaaaaaaataaaaacttcttattagattagacctaggaaattcaagctgacccctttgcctaacttccctagagaaaaacctagaacttggtcatccctttataggagacccctaagttgttctcagggtttggagatgatgttctggagggagtacaagcaaataatctacttctggtaatctgagggtgctttgcgtatttggccattgctcagaagaatagaggttacattatattacattatatgaaaattatttagtttttctatagccctttgtagtttgcaaagcacttttccatatgtgtgtcctctcttccacaccatagccccctgaggaagtaattgttgtccccattttatagatgaaaaggctgaggcacagaggagctaaatatcttgttcaaggctatacaatgtgtgtgattattaggcttggaatcagggcctctaactctaaagcacatgttttttcaactatatgcagaaattgcctagccatggacacaagaaagctgggaggaagagttctacttgtggatgtttttaattttttttaaatatcaggagcaatccagggccatacagctatgaagcacttagtgaaaagaacacaagaagatttactaactgaagttagtattagtgattagaaaacaaaactgccagtttgtgcttcattaaggtgaactcatctctccaagcaggaagggaaaatttgctttccctagcagttgctgcatatgtgtgtacagactgcacaattctaagaaattgtgcaaaatggcatacctgtctttctcccagatacaccgccccctgccccccccaaaaaaggtcaggattaaaggtggtgagaagtgaacatttattaaacagaagttaaaccaatagagagaaaggaggtttgttggagtctaagaggattttgaccatgtagaaattccttgaaacagaccttaaaaggtattgaaaaattgaatcacaaagaaagtttacctttaaatacttgttaatggctcctagatcatggttataatttttctcaatgggaaaaaaagtcttaaaatttgttttaaataagatcctctaatgtctcgagctttttgattctggaaataatttgctttaaaatataaatcaatcagaaagtgatctaccactgaaatcattctaggaaactagcatgggatgcactgcacaatgttctttcctctaaaggcatgggccccataaactgtggcatctggcagcaggatgccatcagtcctttagaaagcctaattttgggccgggtgcggtggctcacgcctgtaatcccagcactttgggaggccgaggcgggtggatcacaaggtcaggagttcgagaccagcctggtcaacatggcgaaatcccgtctctactaaaaacacaaaaattagccgggtgtacgtgcctgtagtctcagctacttgggaggctgaggcaggagaatcacttgaacctgggaggcagaggttacagtgagccgagatggcgccatttcactccagcctgggcgacagagcaagactctgtctcaaaaaaaaggaagaaaaagaaagcctaatattgggagaatgtttgtgtaaggattggaaatctgtttatttttaaataagatagcactgatgtgaatcttatttggaaattacagatactgccattaagcgatgcttttatcttcattaattcattttggtaagcgcctatgcatttctgatggttaggtgccctaggtagtgttaagtatgtccgtgtcctcccttactcccctctcgctccctctaccctctatcccctagggttcttttattaatggaatttctccagttatagagaaaaaaatgacatttgaaaactaaagctcatttatattaatactaaggtcctgtgggcctagtgcgttactcttcccagtgatacctagattttaagagtagagaacagaggaaacatgggatgagaggagagaggttttttagacaacatttgtagacacctcaaattatatcactgttctctagcgccaatattcccaggtaaattgaccattaaagcaatactcactgacctactagtttattttggtcagctgagtaccatcaggatatttaaccctttaagtgctgttttgggagtagaaaactaaagcaacaatacttcctcttgacagctttgattggaatggggttattagatcattcaccttggtcctacactttttaggatgcttggtgaacataacaccacttataatgaacatccctggttcctatattttgggctatgtgggtaggaattgttacttgttactgcagcagcagccctagaaagtaagcccagggcttcagatctaagttagtccaaaagctaaatgatttaaagtcaagttgtaatgctaggcataagcactctataatacattaaattataggccgagcaattagggaatgtttctgaaacattaaacttgtatttatgtcactaaaattctaacacaaacttaaaaaatgtgtctcatacatatgctgtactaggcttcatcatgcatttctaaatttgtgtatgatttgaatatatgaaagaatttatacaagagtgttatttaaaattattaaaaataaatgtatataatttgtacctattgtagatttgttgtttacttttttgtgtggtcagagttgtttcatgtcttcaaatacatgccaaggatcatttactttcagcccacttcataaaaatctttgaactctt

SEQ ID NO: 807 - protein, 648 aa, Homo sapiens
MVRPVAVAAAVAEASLGDGSHGPGPEDRAPARHRPPTPGCDFSSPVPGDHPSLGDCWTLFHHLSGAARPLADHPSGGGTHFDHLSGADQTRADHPFDDHWPGADHPCSDHRTGAHDSPDPDPRSPQQQQQQRPPHPTCHRGPLFASSRMAQVKLELSCVMLPVTAVMVLLRTQRRHFKKANAKMEIPKTAIVQFWLVISQIRQRSSCTIDPTRFEYVFQLDYILQLKSKYLPLTQPVMNLRVSEAVKTEYVCNCSVVGSLNVNRCNQTTGQCECRPGYQGLHCETCKEGFYLNYTSGLCQPCDCSPHGALSIPCNSSGKCQCKVGVIGSICDRCQDGYYGFSKNGCLPCQCNNRSASCDALTGACLNCQENSKGNHCEECKEGFYQSPDATKECLRCPCSAVTSTGSCSIKSSELEPECDQCKDGYIGPNCNKCENGYYNFDSICRKCQCHGHVDPVKTPKICKPESGECINCLHNTTGFWCENCLEGYVHDLEGNCIKKEVILPTPEGSTILVSNASLTTSVPTPVINSTFTPTTLQTIFSVSTSENSTSADVSWTQFNIIILTVIIIVVVLLMGFVGAVYMYREYQNRKLNAPFWTIELKEDNISFSSYHDSIPNADVSGLLEDDGNEVAPNGQLTLTTPIHNYKA

SEQ ID NO: 808 - DNA, 32049 bp, Mus musculus
  misc_feature (1)...(32049): n = A,T,C or G
caagcgaatgttgaaatggacggctaggtccaggtcacagactttgtcagggctttgaatgttctcatgtcttcagagagccacccagtcgtccgttgctgctctctgtgcccaccgtccagacctgacgtttcaggtgtgtgagcacatgatcgggagccacttggctgaagtactaactttgcaggaggtggaagtgaacagactttcaaagatgcccagggctctggctgaggtttgggtagaatggaggtctggagggcacacagctgcaagtcctgtggcacccagggctgcctctctgacatgattcccatcaagaaagatgccaatccctcttttctccgacttgtgctctgtgactctgtagaacaccggcgtagtagaaggggtgctgtggcctccagaggctaagtcacaaagtgccagacagctcagctgcttctcttaggtggctcatctgtctggctgcctgtgttctagacacttcttctgaggggaatgccccaccctggggagccacaaaccagacagaggccttgtgggatgtgccaatcaagcttccaggtgcaggcattaggcacatcagtgaagccaccatcctccatgctcaacatcccgccatctgtagcagcccaggcacctagtgcctcccctagcaggacagtgagaagccaggactccagaagtatccggtgcagctgtgtcaggtggctgtgtggtgacttgccccataggataggtagcccgaacacaaagtgtgaccagtgtgtcttctgaaagccacgtttccaagtccctgacccctgtacttcctgaaactactaggtttccagggttagaccatgagcccagttttcttttcaatgttaaaccctatagaaagaaccggacttcatagtaacaccctctgagttgcccctgtcatgaacaaggcctcttgggagccctcctcttccacctgcctgtccctcagttgctttctgacccctccttctactctgtctgcacttctcagcaatgatggagtctcctttggtttgaagatacacccaacacgacctcctgccttacttactattctcctgaaggcctgtcactaaatatggtgttaattcatgttgcttattataagcccccactagaacgtgaattcaagtattggtagggctacttcccaggggtctaaaagagtcaggcaccagagtactaggtggtcagtaaatattcactgcaaaaagaaaagaaaaccacatcacaatatctgttatcttacaacacgatcgtgtgcttagctctaaaaaaccgcttgccaaatgccccgtgaaagatgtaaacaatgaaggcttctcagtgcctttagaaaggagcacacgacttcctggaccttcagcctccctctgcggcttgcctgcctctttcctccgttgatgggagcgtgtgtccctccctctcttcgacagggctcctttgcctaggatgctggagctggctcaggcgcagcactcttagcttcagtattttatgtctaggtccactgatcacactccccaggtccccaggtccccgggtgcctgcctcacctctttcctcagtctggaaagcagaaggatgtgtgccttggtgtctctgctactcctggcttatagctggctgctgtaggtacaggtgggtatggggagtttgaggaatggggtgcaggggttgggggacatatcaggtggttggattctgttgattttgagaactagttctaagagcggtaggatgaatgcatacacccctgagactggagagaacatagaccacagaaacagaaagtagagccaggacaggcctcctggctatatctctgcacaatgcactcagcgtttccaagctgagtgtcttctttatctgcaaaactgtttagccaatgctgggctcgaactcctgttcttcctgtttccttttccctattacaagggtgatgatattttgccagtggtcagatatatatatatatattttaatggcagggtcttgtcttgctgtgtagcccaggatatatcttcacattattaatcctcttgtttcagctggaaagtgccgggattgtgcatgtgccaccataaccagcaaaaacatgctttttaaagggagaggaaagtagactgaaaaaccgcaattcaaatacaagtttgagtgttttaactccgggcaaggaaattagcaagggtgcaattcaggttgttgccagagggtggcagcaggagacaggggcttagcctgaaggtcttttgcaacaaagcggtcctgaaagccgctggagcgagctagaaggaatgtggttgctggagatttgcgctcagctctgccttctctcctgccggggaatcaggcctcttctgagccaagccaaacctagacgcttccctcttcagcgagtttctctcctattttttttttttttttttactttattgattctttgtgaatgtcacatcacggacctcagtcccactcatcaacctgtctccacccttgcaacctctctccaaaataaaaataaaatacaacaacaaaatccaaccaaaccaaaaaaaaaaaaaaccgcatctggttgtggaagctgtagtgcgtcacagtgcgtctgcttcacttgcaaatgttcactgtgtgagtcattggtctgcttcaggcctttggcttctgctatcactactggatcctcaccaggactcctcttggatatcctgttgttgccctgtgtcatggggttcctgcagctttggatctgcaggacctgccctttctcacgcttcagcagttcgtagatgaggtagattttgggggtagaccaactcaaagtcctgagtgcaactcaaagtctgggactggtgagcctgccacctctccagcactgccctgaccaggctagctcatgcaaagtcaaggctggtgaggggtggggtcagctctccattgctcatggctgggggtgggggtgagcctcagggaacacacacacacaaacacacacacacacacacacacacacacacacaccagggacagttctattgtgctgcccaggcaaggcacagggtctaccagctctgcatagcccttagacattaacaccggctcaagcaggaacctagaccatggatgtccacaaggccttttgtgataatatgagccaccaaccaccaacatcaacaccgatccctgctgcggcatggccatagacccagacatggccctcagtgcagcactggtccagacttcactatggctgggcaggctacttacatcaggctatcctgcatcaggcatgccatgcagtggacagcgggccatactgtggttaggtcatgcatcaggccagcctctgggtgaagcatccttttcattcttgcccttaacctcgccatattgtttgacaatttctggtgatttgttgttgttactgctattttttaaaattgttttgtttcatttttaatttaatacttttattcgttctttgagaatcccatacaagcatgcagccttccgatgtttgcctttgagacagggtctctctgtgtagcgtgcgactcaactctttgggtgctgggtcatgcgtgtgcatctcaggccgtagcgacctcacctagccattaccataaacttcagagacaaattgagcaggtagaattgtttcctcttttgatcacctcagcgctttaatcatgaggaaacagaggcacagagagactgcttccatgatcagagagacagcaggcaggaaatgtgaatcccatccacggagcctgcggcttctaacttggagccgttctgttcagcagtggctcctgctgttcactgaaggtctgcatggacttccagcattctggtcactgtggtcaccttggctagccggtgccagcatccctttcccttctgtcagaagcctcagcctacttccctctacccacacagcagtagcacccactccgtgagctgcttccaagttagctgttgcgaaacaccctgtgtctctgtgtcatgtatgtcttgggctttcagctcacaaactcacaggctctgctggttttacgttgagcaattctgagatatcaccaggaggaaacaagaagcaaggaaaagttacacgtacccaagtagtctttaaagcttcttggtttacttaaggagctaggctggatcccagggttcccaacggccaggctgaggctccacagctgagccataggtgcttccccgcctaccctcaggataaagagctcagtgtcccccattaccacactcttaaacagcacctcccagcccctgcttctctggggtttccctcttcacagtttcagttacacagttcaaaaacctaacatggaaacttccagaagtaatgaatttatacactgcccataactgttctcatgccttattgccactgttgttcaattttgtcattagtccttattaatctcctatggtacctaattttgtaaacaaaactcaattaccaaaaattaatcatggtatgtgaagggtcagcagttcccagacccagtgggggtctgggggaggtatcacttatataaggggactatgggaggcctctccaccaggaacacagaggcaaggggaaagcaaagttgacagacatcaaagctgtcttagggtctagacgatgtgggacatgtcacctcatctgaccttcacaatgagctggaggaactaaggctcaaggacacccccaccccgtgtctggagtcacacatctagtgtatgatgtggaggggagggtgtgttctccaccacgcatgactgcctattcagctgaagatggacaaatttgtccttcttgcagagtcatttaccctgaaggggcttccaggtttggtgaatctggccttggtacgtgaagtgacctacaggtggcaactgcaggaggaagaagaagcgccattgtttttactcagggaagcaggctaggtggagggcacatctgcaggcaggaggtggtccacagagaatgaacgcctcacctgtcacaggatgtatgttgctggccaagcacacccaaacacattgcctggcgacaacagtccctgtgaatgggatgcagctgtggctactgacagatggggccagccagatgtgacctagctaaacatcatccaaaacctggccacaagcagccaggcggtgtggcttcttgggctgatcattgcagaagccatggtgattgtaagttttcagtaaacaatgtttgggcgcttggctcctggtttgggttttttgcctgagtgagaaagtgtgaccagggcttggctggtgggagggacccgagcctcccttaggaagcttgggaaacagcacccagtgatagccttaggacaggaggaagcaggaagctcccagagtttagagcccagcttccgggaactgaaaaccagataatggcgtcacccaacaaggcagatagaatccagaaactccctggatttagaaccctcaactgagtagccaagcgaagaccagattctctctctctctctttttttaaagatttatttattcattatatttaagtacactgtagctgtcttcagacactccagaagagggagtcagatctcattagagatggttgtgagccaccatgtggttgctgggatttgaactctggacctttggaagagcagtcgggtgctcttacccactgagccatctcaccagccccagattctctcttgagttcctctaaaatcccacagatcaaacaatccggtaggatatgagttgtgaaacattgtctctgtcacaaaggtcagctcaacctgagccttgtctggctcttccttgtctcacagtgaaggaagcagagttgggggccttagtcccccaactacagggaactcagccgagcccccccacccccatccccgggaacgtgttctctctcctcctccgtttcatcttctcgtcctgttaatttacctcccaggagccttagtttgagcaagaaaaaggagtggagagagctcaggagatcagcattggactgtagggcatgttgcacatggagaagccggagggagaacccaccagctgtgtcctggaaacccacacagccaaggtggaggctgcaaccttggagctgtaagaagggacgggccacccttaggatgaagactcgatcgatcaaaagcaatgcgtgtccaaggtaagagtattaaatagcagctacaagcagaatagcagccactgtcccctaacagagactcttctctagggcaccccatgtctttttatgaaataagatgagcttatgtgttttgttttgttttgttttttgtcataaagggtatcaaaatatgcatcccaaattgtgcctctttggaacgcagattattttatgccaaatgctgttgagaactctcagagacaaagaaagaaccacaaataggatgcaaggtttcctttgaaagggatattagcatgtatagaggaagtatctatttgtaaaaggtgtttccttttcctctaggaggaaggctggaagaggaggtcccagagcgctgaactcctgcagaccgaccttagtgtgcaaactctgctcccgctccgccactcaaggacagtacctgccttggtcaccttgggaccagctgtccgcatctgagagctttaacctccctcccctttgctgacactaaggcagatgaagccaaggtctaccccacccaccgagtggcttactgtagtgagaattttggtttcttttaaaccccagttatgttctgtgaatatgtttttgatttattcccaggtgtggggtatgaggctgcttcagtgtgtccacagccatcaactatgattgtcttgggctctaggaggagtgtgatttctgccagctgcagagagtttaattctggggactccggagagggaataaatgctagagccatgacgagaggcataagagggaccctggaggaggaggaggaggaggaagaggaggaggaggaggaggaagaaggaggaggaggaggctgctcctggtgttgtttttgaggtttgtcacgtggctgtgagcagaagtgttgcgcgcgctcaactggccaggaagaacgacgctgctacaggatcatatgacttagctgcagtccctggcgcctttgggactgccgccacacccgctccccacacagaagagacaagaagttggagatgtccttactacaatgaagagtggactaaccccaagaagctcagtgccccgaatcaacaggaattagtctacagaggtctatgcccccttcatcctccatcctttctctcttgcctagtgttgggggggtggggttggattagttggagaccagtgtggaacaagtgttggaagggaggtagaactataagatcctggtaaaataataaaaaacaaactgataaaataataaatcaaacatgccaacggcttgtaactgaattcttccttgcacaggctgaccctctttcaatcttgttctttcattttatgtgtctgagtgttttacctgcatgtctgtgaccgtgtgcagtacctgttcaagtgctgaattgtgttgtcacgtagatgctgggaatcgaacccaggacctctgggagagcagccagagctcttaactgtcgagccattcctccaagtcaccgggccatcgctctctcctctgaactgtaaccgtagctccactctcactttctaaatgaatactgtctctctgtcaagacagtgtctccttattggtgactacctttcaccatccacttcacctttactattaactacccattcacagatttgccatttaactggatctctccctttgtgagtcattcttttaagaaccttgacccattttatagctgtccctttttcctaatttttataaaaaattaattttaagggtattaacttttgtcatggatgttgtcggtaatttgccttttttattacctagcttttcaattttttaatatgtgtgtgtgtgtgtgtgtgtgtgtgtgtgtgtgtatgtatatatatatattacctaggaaagttttacgtcctacagagtcagacctgtccgccctcctcctccatggtccccctttgaagctgactcctccttcagaactgaagtggatgcagaaagggcagtgttagccttgcaaatcaggggaggagagcaaggctcctgagagcatggggattacaggagagtgagaggaagagggggcaagactggcccaaagcagaggctggtgtgtgctttctctccccagggctggcagccaggtggccagtgactagaacttagcagcagagacagctgcatgctgtttctcagaaagggatgtcttaggcatcctttatgcaaacaaggttttcgttttaaaagcaatgtgatccatgttggggtgaatacacatgtacacacatgcacacgcacacgcacacacacatgcatgttaacacacacacagtatttctttgttaaatcaataattttcccccatttttaaaatggttttgttagtgattgattaaaaactatgtatacctttgactgtggatgtagctcagtggttgagtgcctgcctagcatgttcaagtttccatcctcaacaccccaaagggaagacaagaaatgatgctgacatcttagatagtaacagtttgcacacattgcaaatatcttggcttgacttctcacacatttaatagctctttgtacatgcatagattctagatttttatgtggcctctaacgtccatctttactatttctgaattgtgcaatacatataggaagattttccatactcaagaataggaattcttttatgtttcctgttaagtcttatttcacttggatttttccccccttggaattaatattttaactcaactgaaatgcactgttgtggctgttgttaagcatctgaaatggaaaaaccgtgattttgaagaccttttctcactgaattctaaagaatcaaaagactatatgttcactgtatctcttgctcacgtgacctctctgttgtctttttagggacattagtccttgtatccctgttcactatttttttatagtcttaggacaagagagatatcttggtacttaagagctcaggctgctcttccggaagacccaggttttattcccagcacccacgaggcagctcacaaccatctgtaacttaaattccaggagatcgatggactcctctggcctcttcaggcatggcgttcatgggtgttgcagtcacttttcaatggctgtgacaaaccatcatgaccaaggcaacttagagaaggaagaatctactgtgctcttacaggtccatggccagcatggccgggagtatggcagcaggcatgaagcatagcgctggagcagtagctgggggggttttacattcctatccacagcaggagacagacagatagacagagtggggaaggggagagggaagagagagagagagagagagagagagctaacaggaccacaagggctttaaagatttctaagcctaccctcagtgacgcacctccaacaaggccacgcctcccaatccttcccaaatatacatatctgaattctattcctatgaccttttgccggtgagtctacttggtcctgttgaaggcagcacagctgagtggccagctatgtttaagcccttgtttacaaaagggtagctatggcaactgacctcccagttcctcttcttcctctggtggggtgctaaaacccaacaccctaagctgtttttgtaaagattaaaatgtgacacagacacctatttcggttaaggagggcagcaaatgcatgagtcgttttgatagggtctctgtctctctctctctccttccccatctctacctctccctctccccctccccctcccctactgtgaacagcaggcatgaaagacacgtggttcaggttgctgggtgtggcttctgccagcctcaccacagtcctgacagaaagaactcagagtcacccctgggaaaagaactctaaagatgaaatgtaaattcctgggtagcttctttctgctcttcagcctttccggcaaaggtaagcattcgcgtggagctcttccggagaccttggagtggacattagaggcgaagagggagatcctccgtagtcccgagacctcagaaaccatcttacttttttacaggggcggactgcagagacaatgagaccatctggggtgtcttgggtcatggcatcaccctgaacatccccaactttcaaatgactgatgatattgatgaggtgcgatgggtaaggaggggcaccctggtcgcagagtttaaaaggaagaagccaccttttttgatatcagaaacgtatgaggtcttagcaaacggatccctgaagataaagaagccgatgatgagaaacgacagtggcacctataatgtaatggtgtatggcacaaatgggatgactaggctggagaaggacctggacgtgaggattctgggtaagtctccattccctaaaggttttcattttaggacggctgctatgtagaaagttggggagcagcctttctgtagcatccccatccaatgttacctgtgtggcccacaatgaagactccagtgggtgagggtggctctaaagcctgtctgcctttcattctctctttgggtggctgtggggttgtacaaagactcccaggtgacagacaggcattaatcagaaagaagacaggttagcagagaaaagacatggacatccttggtggccgatgaagctgtagctagacaggatgtcagagggtgcctaggagcagtgagcctcttgtctggagagctatgtttaagccagggtatgatgagagggcatgatactgaagagcaacaggagaagaccaaccaggagtcctctcctgtcatccaagcgaagccaagcaggtggtcttagtcttggtgagaaccagcaagtgagctgtaagaagtgactcatgcccaggctcctggcagcatggagtatgtgtgccagtgggatctatagcgttccaagagcttctagtgagaagagttgtcattgatagtcattggcctggagtaaagggtgccagggagatgaggaagggtgcaaacatgccgggtgtgggggtgaggaggaagtgaagaagcttgggtgggtgagaaagaagaaaacgaagcctgggatgctgtcgaagctgaaagtccagggacaaactggcagctcacaccaatgggtgagaggagaaagcctgcccttggcttgcggagaaagctgagaatgccttgtgcagaatagatcagccattcagggagcacacaaacattctgagcttcacacaggaaatgtcactatagaaagggctcccctcatccccccgtgggtgtccttcctgtccaatactcagcacctgggcctaacaccaacctctctccagggccccctgttagctcctctgtgcacaactcttcccagacccaaatcctgtaactttatctagagagaatgtcccagaaacggggtgggaatgagaacgaccactcatcgtatcgaaccctgtatagcctattcatgtactctgtcactgcggtgaccatggctactggagagaagtcaggtgcttgttaggtagcctggttttctttggcaatcctgagaactttaaattacaagcttctatccacctataaggaaacgggcctggccagaagtggccgtgttctcactgttagacaggaacaaggtcaggccttcccttgacaaggatggtgatatcccaaacaagctcattggtatacaattcacataccacacagtttgcccgtttgccgtgcgcagttcaacagctttctgcatagtcacagagttacgcggttaccaccataggcaacattttccctacccccctcaaaggaaacccataccctccgactaacagcggtggcttcactactgtatgcaaatgccaaggtcacacaatacgctgactcaacttgaggacctgtccccactatatacgactatatattacgcagcattggaaaattgtcctctgacccaccccaagcctgattacccagtgcaggttgtgtatcacttacttaatgagtttgagattagaagtgtttaggattggggcttttggaagatttcaaaatgtgtgtgtgtgtgtgtgtgtgtgtgtgtgtgtgtgtgtgtgtgtgtgtgtgtgtgtgttcttggagatgggacctaaatgtaaacacaacattcatccatgcattatatacacacgtcatacacactattcaagactaattttaaatagtattatgtaggaaacaaggtctcacagcatgagaatttccatgtgtggtactgagttgtggcttgacagatttcggaacatatcagatttgtctactaggatgttcatgaggcctatactatccaatgaggtgtgtcatgagttgtgagtgtaacggtgtcctatgtgttcctagattttactttcccttattgggcagaacagttcagggtccctagactcctgtgggggagagaagcccaagattaaggagtcatatctagccggaaagtactggtccatgcctttaatcttagctcttgagaggcaaaggcattcggatctctgtgagttagggtccagcctggtctacagagctagctccaggacagccagggttacccagagaaactctgtcttgaaaaaccaaagggggtgggggacaaaggcatatctaagatcgaccctctcaagcagtccaggtcactttcagaaagccattttacagggaaaatatctacagaaggatgctggttactgtgtctgcatgagttaagtacaagcgtgcatttgaaagctttagcagcttaagtaggattgccacttaaaaccttgacagagatgtacatgtcctggtgcccatgaaagggggccataatggtacaatttcagagtaaaggattgaaggtgggttatgaagtcacgtgatccaggggctggggacatagtgcagtggtagagcttttgccttaatgcctgagttatggattcaaccctcagcgagcgcagctctctgactcccaggttcataatccagttttaatttgaaaaaatatattatgggtttatgcatagaaaatatccgataaagatatgcctcaaagtgttaatagtcccgaataacagaactgtaggtgatctccaactgcctttaaagccttttaaaatttgatcagtgtttcttgaaataattggatcttactacgaagaaggtttttcactctagaaagacaggcagtttcttgccaggcagccctgagactacctgatgtgctctgctggatggtgatgcatccatcatctccttattctgagatacacagaatctcaggatggaaaggaaactgcatttctgcatgcttgtaggttgggcggaaatggaattagactcgggaggcctatggggaagacactgtggtctgaaagctagagagaagggaaataggaaaaattcactgttgccctgcgtgacgaattcaggtcttcaggtggagtatggggagctgggcactaggtctaatctcactaacgccaagggtggcgatatttccccctgggctgttaagcaggaggggtgtggagtttgcagtgagagtctgagactggtgacttgtccagggcttggtcacaggttgtctggtttgagacaggtagggagccattttctcatttcttaaagttggagtccttcaaggccagaaattaactcagaaccttggggctaggaagggcagcgtcctttctggctcccccccgcccccaacccccacgtgaaaacgcaggagggcagagatgctgtataaacacacgtcaccatgcctattttactcatatcctgtgtctatttaccagaaatggttctgttcaagatactctgtcaattcaatacagttatcaaaagaacttcaatataatgtgtcgtagttggtaggatgcttgcctactatgcaggaaaacctgggtttgatccatagcaccacatgaaacctggcatgctggcacatacctgtgtcctagcccctggaggtggagtgggggaggatcagaattccaaaggccatcctcaactactgagtttgagaccagcctgagctatgttgaaacattgtctcaaaacaaaaacaaaaacaaaccaagccagggctggagaaatggctccatggttaagagcgctggctgctctttcagaggtcctgacttcagtccccagcaaccatatggtggttcacaaccggctaaaaacgtgatctgatgccctcttctggcatgcaggtgtacgtgcagatagagcactcacataaaataaataaatctttataaaagaaaaaccaaaataaaagcaagactaggacttttgaacttccctggtcccaaaccaattcaattttattaggcatatttattaagattaaagaaacaaacaaaagcccggccattgtacatgggaccatggttccataatcccggctctcaggaggtagaggcagaaggaagatgacttctaagccaataggtctacagagtgagatctggtcttaaaaagaaaacagtatccaaaaatgtgcctaacagaaatcagatctttcttttagagagggtctcaaagcccatgatccactgggaatgccccaacacaaccctgacctgtgcggtcttgcaagggacagattttgaactgaagctgtatcaaggggaaacactactcaatagtctcccccagaagaacatgagttaccagtggaccaacctgaacgcaccattcaagtgtgaggcgataaacccggtcagcaaggagtctaagatggaagttgttaactgtccaggtaaggtggagtgaagcagggcgggggtggggtgggggcgcagggtggcccacatgcacaggggtagcttaccagcctacagcgctacagaacctgagctgggaggccagtctggcaaaggatcagaaatgaaaagacaattatttcttcctggaaccttttggggaggcaggctcctggctacccattttggcagtccactctcagatgtgaccacttcaggcaggctaggagcctcttccagaagaaaggattgcagggttgcagaaggctttttgcaggagggactctgactagcccaaggtccctctgctagctggtggtctggattctgacgtctctttaaaggttccctttgggcatctgatatggagcaaggtttcagaatgcctgggaggcagggcaggggagagctgagctggagaacagagaggcacaccgttcctgccaccaaccggagaccagttctgcactgcaacggctccaggcaacccgcaacacccaaggcctgattgatctccagagcctggagctcccagagataatttggctttgttttgctccagtttgctttgctttttggggagagtcttgctaagtagctagcctaggctggctcccaacttgcagccatgctcctgccttagtctcttgctgggattacagatgtacatccctgtgcccagcacccaacagctgtatttgaggagaaggctatcatagtgcccaagttccagcctggaatgtttcagtcaatccggcttgagctggtctgaccctaacagagctccctcccctccgtgggctccatatgctctacagagaaaagcagtcctgacatgggagagtatcggttgggaaggaagccctgggactcagtctgcctcactcgagtgggcctttgagctgccttacaacatggcagctaggttctcaaagcaacctgaaagcaagagtcagtgttccagagtgaagtgacagcccttaattagaacttaatttccgttacttctgtgcatcacttaaagataagagtgaagctcacatgtgcttggagggatcagacagcagtgaaatgtgtgtgtgtgtgtgtgtgtgtgtgtgtgtgtgtggctgaaggcacagatgcagaaggattttattaacacacccccccccccccaggttcatggatggtctccctcttctgccttcctgtccccaccctctattccccaatcacaaaggcacgaggggcagggcaaagctgcctctccaagactccaaaaaaaaaaaaaaaaaaaacaaaaacgttttcctctttctgaaggccctgagttaagagacaccagacttagtcagtgaaccaacaaagagcggtcccatctattgatcctagaaattattcattgtttatttgaaattcaaatttaactggctgtctcgtattttatctggcaacctcatgcttcatgtttagtgtaactagatccctccagaataaaagtaagtatttatcaaggagggtgaggccttggaaggcaagaatgctaggtttgggagcaggggaccgtgcagcttccttaacctgtagttcagagcagaagctgaaactagaccagggaatggccatgaaggagaaaagggggggttgaaaactcctcccattctaaggccaagtcaggcagggataaagtaagtgtgagctgaagtcccacgaggaggaagcagctggccctggagtagtgctcgctcacataaacataggcacagtgtctccaagaggagtgatgggaagaatagttggaatgagacgctgcaaggaccaatgacagagctacagctactgacgtccccaccaggaacaccaccaggcacccagagtgctgtcatgggttaacctcagaccatactgtggaaggcgtgcctgctttccaacagtgtctggggaagggctggaggtctgcccgaggaccggtagggaggatctgttggagtcagcttggacaggaagccttgtctgtccaccctgctcacacttgggagccgactctgacattccaggcccttggcaagtcaacagggtctgaaggtccctgaattcatccttgaagcagcttcaggggttactgagggatgcccctacgcagacagtgcccagagaggttcagctcacaggcaaggactgctgaggggaagactagagggacagaagtaacaaccaacatcaacagcttgctttgaccctctgccctgcttggtggacctccagcttgcctggggcccatccctagtcacgagtgttaacagtctttggcctctgtgaagctgggctcagctcccgtttcttctcgccaccgtcctttgagcccctgctccagctgctctctctaactgctattgattcacaaagaacagatggtttagcccccccctcctgggaaacagctaccagaaaacccccagggtagagagtatagcaagagcaagacctcacctctaggtgttgttttacagtttacaaaagcacttttccatccattatctgatctgacttccgacagctaccctgtgatgtaaggtgcattgtttccattttacaaagaaggaaacagactcagagaggtggggcgtcttaccaaaggtcacacagctcttacctggaagagctaaactaagcctgttgccctgagcaaccacggcactgttttcctgttactcttccctattctggtggaagaagggatcagaactcttatgccactgataactgttgagtgtctaggcggctttcctgaacccaggaggagtttgggaggaagaagagctgaacaccgaggttgggggatgcttcacttgggggaaaggtcccatgagacctcaggcaactcatcctccctctctagaacttggatgctcttttcctcagtgggggatggggtgagatgggcaggcactgctcctcagcccttgcagatttaagtagcactccaggccccagaagctcagcctcaaggaggcagaaaatcctgtggaactctttcatttgtttgatgtaggaggctggggcctgggccatagaaatgaagggaccactctgcccaagacctttcccttagccatattttcttcttgcagagaaaggtctgtccttctatgtcacagtgggggtcggtgcaggaggactcctcttggtgctcttggtggcgctttttattttctgtatctgcaagaggagaaaacggaacaggaggagaaaaggtaagcacacccactcctttatcgctgtaggctgcagtgaaatccccacgggaccgtccctccttgagtctgcgaagaaagggatgggcagggttggaaccagagcttctgggtggctctgttatgtactcagattgatttctgagggacagttctccggggtaacatcaaaggacccttgagaagcggcagccaggttgtataccttcccagaatccaccacgtgaggctgctttggtgaaaggctagtgtggagatccctgaatcgtccacaaactttcataaggagagagagattccacccaaatcccatgtctgtgtacaaatgtcttggccttggatgcctcaaaggtgcgttcagggccaaactcttaggaatatggataaaactatctccagccaggaggcactgggagtggatcagtgcagagtgctcagtgtgtgtaaggctgtgaatttgactcccagagctgcaagaaaataaagcccaaatgagggtgattggtggccctttgtttcccggttagatgtttaggaagtgaggtgttcaggctgggagtacggctaccttgatgcagacttgtcctgcagcctacaaagcagaaattagttatggtggtcctaagcagggagctgaccactcaagggacaatatgttagagactatgttcaggtgtgtaactacggatgctggggtaagggcagtctttagttggttacatgctagtgggtgggcatgtccctggggtcttgagaaatctcagactcacatagggctgggtcccatccctgcaggtctccacctagagtaaccccagtgatgttcaaatactgacttccagcacagcccataggcagggtctgcccataccccacaatgctggcccctgacccagagcccagtaggtttggcttccttcttcacaactcatttctcagtgttgcccccatcctccttcaggccagcatcctcatctgtcatcttacgtaccacttcccccacctggggccgggaacatcattctctctgcacctttcatgtctgggaaacatcattcccaggtctccatccggtacagcttagtggcttgcagagcccttgacactggctcccttatctctgtgctctgctcatactgtctccatccctccttataaggctcatgatcactgcccaggggtcagacacattcctccaaagtgaacctcaggtgtcacccaacacatggcaacctctgccaccaccagactgggaagaggaaaatgacagtaactcacgtgaataaagtggcctgttccagggacaaagtttagttttttcgatgtaaggtagacatttgcacagataaagacgctagctaccaccccagatcatacagcacataggccaaagcatgactaggctgaggcaagacccctagctcttgaatttctaggcagttttatcttgttcttatataactcttctttaaattggacatctatgggcctggatttcctcacctgcatctatagcccaaactgagccatcaagagatggtcttataagaaaggaaaagaactgaaaggctcctggaatgatgtttaggcagtggtagaccttgctggagaggttgtactgggaccctatggttctgctcgtaagaggtgggtggcataggtcatagcaagtatatggcttccccagagcaagattgctgcccaactcagtgtaagggctcagcatctggtcacacctcttaccctctcacttctcacatggttctttgcaccttctggtggtcccccaccttggtggaggctgacaccgtgatgtgctgtttggctcttgtcactcacggaggacagtgttgctgcctgagtcattactgaggtgtagcaatgggcctaacacatagaacacgagagaaagcacaggaggggaaaaaaatgccacaaacagaagagccagcagagagtcatgggagcgtgccactgtgcaagaaggaccacctgctggtctgtgtctaggaccctggattagggtcaaagtctcacctatacccctccaaacacctcaggcacttctggggcaccgaacatggcataaaggacatgttctgtcttttgggtgtctttttatgtatgtgcttagagcacgcaggtccctcaggtgtcaaagccaccttgtttgcctttgaggctttgtgttcgtagtgcatttacagtagttacagtagccagtgtattacctggggtccatatgtcagccccctggtgatgtggagacatgcttttcaagacaaatgttctaaaagggtacaggcaaccattcatttaccccgcagagaagctccccctggctccttgaggaaggctaaggcacagggagtggaataccaagaatgtgccctgaaggagcccagcagtggctccaggcttctgccagctgcctgttcccacagattttctgtgtggcttaaaaacagtgtaagaagatcgacacagtctcaggcttgtcttcctggacagaagccacacaaagaagaaaatccccaagcgtggggaaaggagccatctttcccactgaagcccaagagccgggtcttgcttacgaattttggaagagctagcccatttctcagggctagattgtcccttagagggcactccagtttcctttcagaatgtggcttgtgtgacaatcaaattgagcaaaaggcagacctactgtagagacttcacagaagatgtatagtctctgatgcccttcacgaccactcagacctgggttcagtgggctcgggccctgagggttgttgcttagcaaccttgctgattatctctaggcagcatccagctacaactcccagatgcaatactcactccaacactctagagccttaagtacaaagctctccacccaggtgtcttcttccctcatatttttgagttctaaagaggcctaggtctcagggtatctatggccaacgtttctctctcccctgacacacccagaacttgaagagggtgggagtaacttccctttcctcttcacatctcctgaagccgctggtttgatgcctatcacatgaagcgtgttcagtggccgcatcgtggggctggggaggcagctccatttctaaagtgcttatttttcaagcatgaggactgaagtagactcctcagaacccacataagacgggcaaggtggtacttgcaaccccagagcagtggcaggtgaattccctgggcctagctgggcttcttgataagttgcagggcaaacagagacagagagacagtaagagagagcaagagagagagagagagagagagagagagagagagagagagaattaatctcaaaaagaagaaaaggcgacagtgcctaagaaatggcatcagaggttatcccttggcacacacatacatgcttatctacatatgtactcacacacacatttgcacacccgtgttaaattgttcactattgtcagaatgagttcttaaaacgtcttgccattatagatgaagagctggaaataaaagcttccagaacaagcactgtggaaaggggccccaagccgcactcaaccccagccgcagcagcgcagaattcagtggcgctccaagctcctcctccacctggccatcacctccagacacctggccatcgtcccttgcctccaggccaccgtacccgtgagcaccagcagaagaagagacctcctccatcaggcacacagattcaccagcagaaaggccctcctttacccagaccccgagttcagccaaaacctccctgtgggagtggagatggtgtttcactgccgccccctaattaagaaggcagagttcgtcatttccaataaaaagctgtgtggatttatcttcttcaggtgagcatgcccactcttccgtctagtgtttaatggaagtaggacccaagtgcctcccgagacttgcaggacaaagtggtgtcttttgattcagctacacagtcacttggtctggcctctggaatctgaggcctcttcttagatctgtcgcggcagaaacacagaaaccacaaacatgtgcacataaggatgttggacaagcagcataaaggtttcaccttcctctcaggtcctctacccatgtgagctaccacatgaccgctggctcatgtcctacagagctacctgagcagaggttcgagtcccccaggtgccccaatggacactggccacttcccttgagcaggggtaaaataaaaatttaaccctgcttgttttagaaaggagaccagggtctgagataggaagctgcaaactgggaaagaggctggttggggtgacaatatcaaatctggtccactcgggccactggattgatcttaggagccatcacctgaatgaccagaaccgacacctgtgtatcagctgcaaaggggtcccagcatcttgtgtagacacctttgtacacatactttaacaacaggtgccccatggacactcagtttcttgaccactcaaatgggctcacaatggtctgtagcattattagtgtaaagagggagcctctatagatactggagataccaagaacccatcaggtaacatccagagggcaggctaatacgcctctggctccattcctgagttctgtaggtgacactcatgaacagggcagagcagtctcactagcagtatggcagacccaccctggagaggctgaggttgggggaggtgttcggttaaaattggaaactcatctaccagaggcacctgctttacaacacagggcacacttgtggcccgctctgcccacttcttgtcttcttaggctggtaagcctgggtaagagctggcaggaagctctgagggtaaaccacaaagactgaatatactaaggacttcctgtgagggctcagctatgctttactttcaatctggtaccttttgtttagaccccagtaaatgactaggtcaaagacaaactaagtcctatgccccattcccttttattttcaagacaggggtttttctgtgtagccctggctgtcctagaactagctctgtagaccaggctggcctagaagtcacagagatccacctgactctgcctgtcgagtgctgggatgaaaggtgatcaccaccaccgcctagccatgtcccacacctttcgaaatgttcaaacattagttccagttacacaggatctacccgggcaggagaagagtagacggtctctgacttgaggatttcatctccatctcagtcccaagcgatgggcttggagtccactggccttcctgatgcaatagcttctctgcctccaacccttcagaaagccttctttcttttccatcctctcgccctgcctttcttctactgttctgtaacattttgtatggcacaggacacatctagcatgcgatgtttggtcctttatgacagtccctttattcatttgatagtcattgaactctgctgtgaatctgtgttagaatctagaaggagacactaaaagcaagaggaacaatgacatctgtgtatctaggcagctcaagaggcaaggcaggcagtgggccaacgacaacacaaatggagcctgtattggcaaacacagatcagaggcaagccagggagctcaagaaaaggcaggccgaggactgggtcactaaactggggtggcatgggagcttccgggaggggtgacgtctgagttgagctgtaacaggctagaacagctaaaggtaagagatgctaatagactggaagcaaggatgcagttacccatggcgaggaaagggcagctgctgtagtcctttccaactgtcttgtttcgccaaactgtcttgttttgcaaggtcgcatgaacttttcctgggagatgtaaacatctgcttattccagacaggtcaacagcaacagacaacagcacagctccatggaagtctaacttagtaaactagtgagtttgtcgggtatacttacagagcatgagtgaggggttactcacaggaggagcatgagtaactccaaagaggccacattactgaaaatctcactgtaccatagaagacgatttctccatagctgcatagataagcccccttcaaccaatcttcttttctggagacttgtagcttagcagaactatacacagatgggagggtggtgcagaagggtgtggctgagattccaagagagaccagataactctgaccacccttccttctataagaggaggtcagtcaacagtagtggaaataacctgtattgttttggggtcctctctgaccaacaactttagggaggtagctcattcctgggcctgggcgtttccattagtaacctctgctctttggaatatcttttttcaaccaaacaggattccttttgctcattctttaaccattgctgtaacatcgacaggcataggctgttgggacgttttctcaatcatcttaatgagtatcatctatgcctacctcaaccataaggctcctaagagtgccacagcaatgcctggctcatgtatctttgtgacctggtttcccatccttgttcccttaagcgcacctgttgtctttcagatgatgtttctaaatctgtaaaatacttggaagccgacgtcatagcatctatgtaacgaatcattcttagaaagggtggcaggatctctgaagactaccaccatgggttccgagaagtgtctcagtagacagcagctaaagagagagcaaaggatgggattggtgaggttcatacagcaccaacagatttcgttgtctctctgaaaaggtcgttgctgggcacaggggcttggatggaaggcactaccctacgtcgttcaccaccgtttctatgagcgattaagcgtcttcatcctggtgaacctcatggggatctacaggcatctcctccactgctacagacagctcagagctaatacaaactggctggcttagcccagagtcaagaaggggagactttgtcacatatctaccgggtactccctttccttttagcccctcccacctcctaccacccccccccccatatgaaatggcaaacctccacctccacctcatctcatcctttatccaatttgctctgcaagccagaggttaggggagaatagcacccacacatctctttcatattgcaagtcatcccttacatggccagatcatctggatatatggcccagcctacactgtgtgtcttagctcccatagcaaaggcaatgcaacttctggcagcttccacaggctcctccttcaggttttctcttgtaagggactaaagtgcattcttggggctatcagccattctcaggatgtccctgttctttctaggctggccacattcgtcaaagaggcataccatctgcagtggcttgaaggagaatggcccccataggctcatatttgcaagcttagtccccacttggtgagctgtttggaaggattaggaggtgtggccttgctggagaaggtgtgtcctgggggtgggctttgaagtttcaaaagcctgctacagatctagtctctctatctgtctgtctatccctccctccctctccttccctccctcctcctccttctctcctccttctcctccgtctcctccccctcctcctccttcttcctctctctctctgtctctctgtctctctgtctctctgtctctctgtctctctgtctctgtctctgtctctctctctgctgcctcaggtccaggatgtaaagctcttctccagcatcctgccggcctgtgtgctgccatgtttcacaccatgattataagggagcaagcttcagaaactgtcagcaagctcccagtcaaatgctttcctctataagggttgccttggtcatagtgtctcttcacagcaatggacactaaataatgtaccaccccattaaaaaaaaaaaaaaaggcagcctcaccagccctctgtatccccagggttctccatctccatgctcactgggctgtgattattccatttccaaaggctcgctgatgtgtttgccacctcactgtacacgctcttcccactgtgcatgtggttccctctcctgcaccacttatacctgtggcttgataatgggtgacaactattaacatctagtcattggaaaagggcacctctggttgtaaattaatcagtaagcgttccctaaggtgacacgtagcctgctctgagttggatacacctgagtcagttccctaacactcatcccctgggagagatggatagcagtctctactggaggcattagaggctcaagaatacatctatgaaaccaccccacaagacctagcctgagccacagcctgctgccactgccctggaagcaggatgatcctgatagtacatctggacctcagtcttcaaggcagcctgctgctttagtcacagctccatagagttagggccaagggcagttctgacctttgcatcagccaatctgcttactttggggtatcactacccacccatcctggtcagagttaacacaggggaggtgcttgcagctgatgactagaggtgggctatagaccttcctggattcaagcaaacactcagccaattctagagagatcaaaggaaccagccaagtccaacccagacatatggactgaggaggccatgtccagatgcagagttgtcctcagtcagaggcaggtcaagggcaacagaaggtcggcgtcccagtgaaggctagtaactcatcgcatgcaccagctttcacttcctcctgaagctctgcatcattacactaaactgaacaacacaaaaggcctgagccacaggaaaggaagaatgggaaaaacaatagcaacacattttggggaactagagaaagcagatgacggttggtagctaagagactctaaaagttgagtcgacaccattttagttctcaattgctgtgagaaaacaccagaaccaaggcaacttataaaagtaagcacttaatttgaggttcacaggtccagtgggtgagagtccgtgaccatcatggcggatagcatggcagctggcaaggtactgaagcagtagctgagagcttacatttgatccacaaacaagaggcaaagagagcatgggcattttcaaacctcaaagctacacccagtgacatacctcctgtcacaaggtcaaaccccctaatccttcccaaatagttccaccagctaagatcaagtattcaagtgtattagcctatggtggccattttcactcaaactcctacaaatacgaaggcagcaaggaaaaagacagcataaatgtgctcacagcattaaatcctgactgtcaggaactggagtcaccattaagaaccggaagcacaatgtctctccaggaggatagatgaggttacaatggaagaccggtgcaagatcagttaaaggagcagttagggtcagacacagtacacaccactggaaccccaggaggctgagacaggagaatcataagttcaatgtatgagacccaggtaggaagagagggagagttacacccatttctgtgcccagtaaggatcgattgctgccagtagaagccttatggttcttctccatagatggtaaaacacacggttcctggattagaggacactgggaatagttgacagtagagtatacattaaatatgagaggttagataaccattttctactgaaagtgggggcccaggtggcaaagatcaggtagaattgttcatgataaggcagactattggaaaatgacccactagcatcaaagttttattagctgaagagagaaagcctaacagtatcaacacccaggcttccctgggtgatgttccaacatcaatgctccgtggccctggggtgcattctgaagtcactgagcaccacctcctcacagagagttcaacccctaatgctcccctcttagacaccagcagatggtcatggaccctgatggagatgaagaaaataatgggagaggtaaggttcgaatgcacagaaacatgcaggagagaacaaggtgagacagcccacagctttaatgccctacaaagaatggggaactacttgttcatgaaaaaaaaaaagaacaaaaaactataaaaaaggaatatttagagaacaaagactgtcctagagaattacaaatacaatagtaaaatcagacaagtgtgctcaaaatagaagatagacatttcagaagaaagggcagagcaggtttattgcccatgagataattctagaacgctttcagaatggaagggcataacctccatattaaaaggtctcactagtgttatgatttttggttcctcatgtatgaagctagaagactccattgcattttaacaactaaaacactgaatgaattgaagattcagacaaggaatctctacctcaggaggactcaggcaggaagatcatgagtctctggtcagcccaggttacttagtgagaccctgtctcaataaataaattgaataaaattagaaataaacaaacaaacaaaaacataaacaccaaaataaattttaacaattaaaagaaataatagaaaggaaaatccagccattcttttaagagatgggggtcacataacaaacaggtgcatgtaagttggagatacagagacctgtgctttaccacagtaaacccccaggcacagctccagggatcactgctcaagggaggccctcaaattgtgaacctcacctccatgggtttgatgaccagtatttcagagatgtttgaggggggggggggaaatctaacatcttgcaagaggagagaaaacagtcactctgaaaaatatagaatgctttgtttttcaaatcaacatccaccctgctgggatttgctcataatctaactgatctaaaaataataataaataataataaaggaaacattcacgttcagctcccatggatcattggtccacctataaaggggtaagagaacaagaagcagatgtgggatccacagtccagaggagggagctcattaggagaccaatgactttgggatttctgaagactatgtcctctcctcacacaacctaccattgcctgactaaaagtctcttcattcagttaacccagcatgatatgtgtgacaatcaaggaggtatcaccaaggccagttacactgctcattaggtgtgggaagtgggtgtggcccgcagtccccttgaaatccacttgtttactgcattgcccgagcatgcgcagtgaaaaagcattcgtgggctgtgagctcgtgtctggagacatgtgtgaattctgattggatgaggtgnnnnnnnnnnnnnnnnnnnnnnnnnnnnnnnnnnnnnnnnnnnnnnnnnnnnnnnnnnnnnnnnnnnnnnnnnctgttgtaaggggagttgttgtaagaaaagctgcaagaaggagaacaagtaaagaagctgttgcgtgaacccaccttggtgtccatgtcgttcctgtcggtgaggacagcgacaactaagtggggacacttgccatgaaagcttgatgatgtgagttccatcacaagaacccatggaagaaggcaagaaccaatgtatgaaaggcatcctccgaccttcatacacacacacacacacacacacacacacacacacacacacacacacacacacacgagcattaaaaaaaaagaaaataacactaaaattccaatctatgatggtcagagaggatgctgggagttacttcagttttcttttttctttttatctgttgagacttgctttgtgtcttagtacatggcctgttttggaaatttttccatgagctgttaagaaagtataagtacactgtagctgtctttacatacaacagaagagggcatcagatctcattatggatggttgtgaacccccatgtggatgctggtatttgaactcaggacctttggaagagcagtcagtgctcttactgtatcagatattaacatagctacatttgcttgctttttaagcccatttacttagaacatctcgttcgtccttttgccctgaggtaatctctattcttgatgttgagatgtgtttctcagatgcaacagaaagatggatcttgttttctaatactgtgactatgtgtctttttattggcaaattgagacccttaatttcagagttatcaatgggaagtgtttattggttactgctattttgtcgttttggtgtttgctttctccccttacctgatttactgttctggtattattttgttgttgttatttgtttgagatgttctattgttgttttgtttttgaagacatggtttctctgtgcaattctggcagccctggaactcttgctgtagaccaggctggctttgaactcagacatttgcttgtctctgcttctggagtgctggaattaaatgtgtgtcttcttgagtgcagttaatctgttcagagtgaggttttctttctagtgccttctgtagaactggattggtagataggaattgctttcatttttatttttcttcatcagttgcaactgatagattttctgggcatagtagtctgggctggcatctgtggtctctcagagtttgtagaacatctagctaggctcttctggttttcagagtctccattgaaaagtcaggtattattctagtggacccacctttatatatgatttgatctttttttccccttgtagcttttattttagtatgctttcttgttctgtacatttagtgtctcgattaatatgtggcatgtggacttccttttctggttccatctgtttggtgtcctgtatgcttcatgtttcttggtaggcatctccttttttagattgggtgaacgcatctacaatgttgttaaaagtgttttctgtgcctttgcccagggtttcttctcctttcacactttatgtgttctgtgcacctgggcctttttagactgcccatgttctttgcctgagccttccacctcttctactttgttgtccctgaacttccactggtgagactcacctctgacaatgtttgggtttacttctgttttttacaccctaactttttcatcttcagttttatttctgcttaggttccttcaataatcctaatcctttgctatgttctcctttccagtcttgaattgttctcacctctcatcacttcacttaacagtttgtgctttcatggtcttcattaaggcatttattcagatcctctttgaggcccttaaattttttaaaattgctatctgaagtccttgtcttgtgcttcagctaacttgcatttctcagggcctattgcagtagggttactggctcctgaaggaggcatattgtcttggctgttcacatttgtgtttttacatatagatatagacatttggagttatgatgtttgtgatgtttcttgatatagatacctgatcttgcctttgttgagagggtgttctgttgttgttgcccactttggattcaaggcaagtatggaggccctagggtccttggtagaaagtcattggggtcagtgggacacaaaggaatggagatgggccagaagaaaggctgagaggggaggcaggaaagagctagggagcctggggttctcaggagtataggtagggtgggagctgggactcctacaggcaggttgctacagaactaagaatagtagatcagaagagatcagaatggcagactcaagactagtgaaaaccatctttgtgcttcccagcccaatgtggccactggggggtctttggtagaaagtgtttcagagggttggtggctaacaaaatggccagaagacaaggctgagagggttggtgggcaagagctcatctggatccctgccaagagttgagtcccagtgagtggtaaagtgatatttttgtaagaaacgaaacttgaag

SEQ ID NO: 809 - DNA, 1144 bp, Mus musculus
gcctcaccacagtcctgacagaaagaactcagagtcacccctgggaaaagaactctaaagatgaaatgtaaattcctgggtagcttctttctgctcttcagcctttccggcaaaggggcggactgcagagacaatgagaccatctggggtgtcttgggtcatggcatcaccctgaacatccccaactttcaaatgactgatgatattgatgaggtgcgatgggtaaggaggggcaccctggtcgcagagtttaaaaggaagaagccaccttttttgatatcagaaacgtatgaggtcttagcaaacggatccctgaagataaagaagccgatgatgagaaacgacagtggcacctataatgtaatggtgtatggcacaaatgggatgactaggctggagaaggacctggacgtgaggattctggagagggtctcaaagcccatgatccactgggaatgccccaacacaaccctgacctgtgcggtcttgcaagggacagattttgaactgaagctgtatcaaggggaaacactactcaatagtctcccccagaagaacatgagttaccagtggaccaacctgaacgcaccattcaagtgtgaggcgataaacccggtcagcaaggagtctaagatggaagttgttaactgtccagagaaaggtctgtccttctatgtcacagtgggggtcggtgcaggaggactcctcttggtgctcttggtggcgctttttattttctgtatctgcaagaggagaaaacggaacaggaggagaaaagatgaagagctggaaataaaagcttccagaacaagcactgtggaaaggggccccaagccgcactcaaccccagccgcagcagcgcagaattcagtggcgctccaagctcctcctccacctggccatcacctccagacacctggccatcgtcccttgcctccaggccaccgtacccgtgagcaccagcagaagaagagacctcctccatcaggcacacagattcaccagcagaaaggccctcctttacccagaccccgagttcagccaaaacctccctgtgggagtggagatggtgtttcactgccgccccctaattaagaaggcagagttcgtcatttccaataaaaagctgtgtggatttatcttc

SEQ ID NO: 810 - protein, 338 aa, Mus musculus
MKCKFLGSFFLLFSLSGKGADCRDNETIWGVLGHGITLNIPNFQMTDDIDEVRWVRRGTLVAEFKRKKPPFLISETYEVLANGSLKIKKPMMRNDSGTYNVMVYGTNGMTRLEKDLDVRIRVSKPMIHWECPNTTLTCAVLQGTDFELKLYQGETLLNSLPQKNMSYQWTNLNAPFKCEAINPVSKESKMEVVNCPEKGLSFYVTVGVGAGGLLLVLLVFIFCICKRRKRNRRRKDEELEIKASRTSTVERGPKPHSTPAAAAQNSVQAPPPPGHHLQTPGHRPLPPGHRTREHQQKKRPPPSGTQIHQQKGPPLPRPRVQPKPPCGSGDGVSLPPPN

SEQ ID NO: 811 - DNA, 34766 bp, Homo sapiens
tctgatagccctctaggtctcatgttaaaatattggagggataatgaaaggaccaaacataagaagaagcagaaaatgataaatattgttgatttatttggaccaaatattgttgctttatttggaccaaaaaaacctattctcaaatcttcagttttctcaccaaggtttgggtcaaatgaggattggatttgtcaacttttaatagaatatgtcaatgataaaagtcctgtctcccaagaggaaatagactatgccctgtgctgggggcaggggcctgtcctcttctaccctctaaaagctacaggaaataagccagaaactacctcccctaaagaaattgagacccctaccccaaacagtccattaacacatgggatcctttagaccaccttcctctgctaaacaccaccaactttgcctcctcctcaagcagatgtaaccaccccaaacccttcccctgctcacgttgttccctccccttataatcctgactcttggggccattcccagtctgaatgccctgtcctaggaaagcttcaatgtgaaatagaacaatgtaaaaaggatattcgaaacttccctttcccctcctcctcaaaggagtctgccccaaccctttttcccttaagagaagtaccacttggaggaggggaattggctctgaaaatgcccccttaactagttcagaggtcagaaacctgaagagggaacttaaatcaccattagatgatccttttggggttgtggatcaaattgaccaatttttaggaccacaagtatatacttgggctaatgtccatcttaagtattctcttttttgggtggtggaggggaataaacatgatccacagggctgctatgatagtctgggagcatgcacatcctcccagtcaaaatatccctgcagtagaacaaaaatttccagcccaagacccccaatgggataatgataatgcaacccaccgaaaaaacatggaagaccttagggagatgatagttaaagggatttgggaatcaatgcctcaaaccccaaatatttcactagcatttaatatacagcaggggaaagatgaagggcccatggagtttttaaacagactaaaggaacagatgagaaaatatgcaggcttagacatagaggatccccttgggcaggtgatgttaaagctccattttgtcactaatagttggccaggtatcacaaagaaattacaaaaaaaatagagaactggaaagatcggcctatagaggaacttttgagggaggcccaaaaaaacatatgtaagaacggatgaagaaaagcaaaagcaaaaggcaaaaatcagctctccactctacaacaaagtacccaaggggccaaaacctgtaaacaacttaagcccccactcgctaggcatataaagggtatgaaaaagcaaagcaagggaatttaaaaataaggagagaaagagagcagaacaaatgtttcaaatgtggaagaataggtcacttcgaaatggaatgtcctgaatgggaaaaagaaaaggaagtcatcccacctatggccttcgaggaagaataggggggtcaggggctctgtttcttttatctcgagttccaccaagagccgttgataaatttagaggtgggacccaaacccgagctcattgcctttttaatcgactcaggggcagctcactcctctctttgttatcctccatctggtgtactttgttcacaagaagaactcctgatctcaggagtgaaagaagaaggatttaaagcaaaaatcttagaagaaaaaaaagtcatggaccgtcaccccaggaccaacccccaccagagtaatgttaaagaaaaaagcctaatctgactgtccctttttcctcttctctttcccttagctaccccacatctcattattaatgtaaccaggtcaaagtcaccccaaatcattacttttgatgcttgtcttgttataccttgtggagacttgcaaagtcaaaggcagttctctacttcagaaaagtatctttgccattcttggaaattatcagattgggcagattcaattaactgggcagttcccttagacttgggatattataaagaaaactctgttaactgggaatcttgtactccgaaaacagagtttctctgccgtagcttgtccaaaattctatggactaccaaaaatcatggttggacctccccaacaactctctgtgtgtccaaaaaccatacattcctttcaccaaatgaagcccccaccaactgccagcaaaaccaatgtaatccagtacaaatttccattactatcacaacttcccaaaattcctccccttcattaagtcatttctatggtataggagcagaggtcgcaggggcagactctataggattttttgaaatgcgtttcgtcaccccctcatcccctcctccctctcctaaaccttctaatcaaactaccagtctctccctacccaatagcaacaccaaagtagccattgtagaagttaaagatttaaaacaaatcctagctattgaaacggagtaccaagatgcaaatgcctggctagaattgattagatattccattcacacactaaacaaaagcgattgttacacttgtgcaacgggaaggccagggacccaaattatcccctttccacttggatgatcctccaaccaacagggtatgagctgtatggtagctctcttccaaaaccccacagcctggggcaataaagcatgccgaatttagcgggatgcagtaagcctaagccttttcaggagctaaccaatcactctgcccttgttcatcccagagcagatgtatggtagtactgcagtggaccactactaggtactctgccaagtgactggatcggcacttgcaccctaattcaattggccatcccttttatcctgacatttcatcaacaaagcaaaaaagacaattgcaaaaaagaagtaccatccccccacgggtcctttgactctcacatttatatagatgccatcagagttccacaagagtgccaaatgaatttaaaacttgaaatcaaatagctgcaggatttgaatctatattgttctcatgggtaaatgtaaacaaaaatgtagactggataaattacatttactataatcaacagcagtttgtcaattatgctagggataccattaaaggaatagctgaacaattaggccctaccacccaaatggtccgggaaaatagaatagccctggacatgatattgactgagaaaggtggggtctgtgtcatgattggggtccaatgctatacttttatccctaacaacacagcccctgatggaacaattacaaaagccttacagggccttaccaccctaacaaatgaattagctaaattctggaatagatgaccccttctctggtctcatgggaaaatggtttggaaaatggaagagactcataacctcaatctttacccctcttgcaattgttataggtgtactcactcttgtaggttgctgcatcataccttgtatttgttgattagtgcaaaggcttatagaaaaagccctcatgaaaacccctcgattctcccccaccctactcagataagttcctactcctaaatgactaagaggagcaacaaagtcaggatatgttaaggaaatgtgaagagggagaactataaagtcaagagggggaaatttgccaaaaataataagttcctcttctaagcttccttggtctttcttaatctgtaatgagcacttcgtactctgcttaatctgtaacgagcacttgtttctctgcttaatctgtaactggcaaacctcttactctttaaacaactcttttcacctagttggtaatggacagcctctcccttcctgcctaattggccttattcaatttcaaacactagccaattgagtcagcttagactgtgcggtctgactccagccagtggggaaaggacacagaaacaggaactgcattagggataaaaacccctgtgctaccccgcttagtgtgctcgtacaatcagagggacacaggcagcacccatctgcagaagtaaatgtgccttgctgagaaattttctgtctaagtgctggtttttccttgtggcactgagcacttatttctaacagtcctgacttgacctgagccttgttaaggctctcctttgacaaagggaaagggaggtagaagtcaagaccatcaatattttactaatcagggaataagaggtcaacctaaagtaagacctccaagaatattttcttccttctctgcttcttattctcttccctgtagcctacttccccaggagtgtgagtttaggtaagaaaaagaatcaatgaagacagagcaagagctaacctgtacagtgcagcaagagtggcaagggaggagctggaatgagcaaccgagtagatggtcccctgaaatgcaaacactcagaggcagggactgcacctgcctcagcactcagaacatttaccgaagtgacaggtccacttagaattaaacataattcaattgaaggacaatacgtgttcaatttagatatattagaatagcaacagcaagcaaggagggcagaatagtagctattatcccaccacacagggaccaacaccctggggacattctgcaagagatgcacccaacacacgctttttgagaaataaaatgggactatattgttgactgtgaagggtaccagaagatgctgatgtaggacaggtaagccccattggggcttagcctggagtattcttggcttcactcaggaaagaatcaagggcgagctggtggtgtttgacagcaacttttattgaagcagcagcagaggtactgctccttgcagagcaagtatacaccacaggcagtgtgcccagagtatcagcttaaaggcagttctgcagtcctatttatacccattttaattatatgcaaattaaagggcagattatgcagaaatttctaggaaaagggtggtaacttctgggtcgccaggtcattgccatggaaaaaggtggtagaagttggttattgccatggcaacagtaaactgacatggcacactggtgagcatgttttatggaaagctgcttccacctatctctgttttagctagtcctcaatttggtccagtgtccaagccccacctccagagtcaagttccacctcctacttcagtgccaccctaaaacatgcctttttaacatatggtttttttttgagcaaaaggccatcatgaaccagcagaggcagtaaaagctttaaaaacatggcacaatatttttcttttgtaaagaaaatttacaatttctgaagaaaatagccgtttgtaaaaggtatctccctctcctgtatcaggaagaggaggactcttaacaactcttatcaatggagaaggcattggcttcaatctgcataacaaaccttactaaacacatcttgttgtttggcacacttttcctggtcattgggtaacttgcctccccaacctagaagccccaaatcgctttttctttgtttagtctaatatactctataagtccaagttctaacatccctttgggttactcaccactgggtgctcccatgtttatgagggatacacatcttaatcaacttcaatgtgcctttcccttcttaacctgtcttttcccagtctggtttacagggctccagccagagaacctaagacaagaagaggaaaaagattacttttcacctctcctacaattgggacctgtttttgtcatattccacagcttgtctatatcatgatttacttaaccaatttccttctcttagacatttaaattgtttccaattttgtctttaaaatactgcagcatataaatttatagccaagtctagtacatagccttcattatttccttatgataaaatcatccttgtggatttgttagaaatccacaaatgtttgatactctaattcacactgacaaattgcccaccagaaactatacctacttgcaattctcctggccatatacaagaatgcccatttacaccatcatcaacactatgttttcatttttcaaatgaagatgaaaaatgcatctatgttaaaactgacatttctttattaataaatagaaataaaatttttcttttgtggattgctccttttatgactttgacccattttagttttaaggtgtctatcttttctatgtttacaagaaaaatttaatactaaaaatttaatgttggccaggcacggtggcccacacctgtcatcccaacactttgggaggccaaggtgggaggatcacttgagcccaggagttcaagatgagcctgggcaacatagtgagaccccccgtctctacaaaaaataaaaaaattagccaggcatggtgccacatgtctgtagtcccagctactcaggaggctgaagcaggaggatcacttgagctcaggaggtcaaggctgcagtatgctgtggtgctgtggtcataccactgcactccatcttgagcaacagagcaagaccctgtctctaaaattaaaaaaaaattgttatgcctttgtcatgtatcttgcaagtaatttgctccttttagtacgttgtctttaatttttttatggctttttacatagaaagttttcacattttacagagtcaaatctactgacctctttctttttcatggtttctgcccttgaagccatgctcatcactcagaattgaattagttttagaggagcaaaattaatgtttcaaatagaggaacagaaagctgctcttcacatgctccatgaggaaagtgtgaggaagagaggacaagcgccctccaaagctgagatgggtcagaggatggctggcgccaccttctctccaccaggccttgacacactggagttggatggcagctggtgggtcagccactcacaaacaggaagctccatgctgctcctctgggttggcgatacttttgaaaaaatacgtgtgccctaagcatcctttcttaaaaagacattttttattaacaaaaaaggtgcttatttccaaaattttaaacttcacagaaataaataaaatgtgaaagaaacataaaatcctgggaccccaattcattatgccaaaaggaaaaattaagctgaaagttgagtcacacaagaaactgcctttccttgagttcctaagcagagagttacagataaaaagctgctgtctccacgggtagctactctatgttcaccttatcttaagaaagtgccaatttactgagcatgagaagaatacaaattgaccattcccctacctactttttttctcttgcaacatatggattcagtaatgtgactgtaccctccctccttcccctctggccagcttttccccttaactgaaggttttgaaataatcttgagaaaaaggcacaaaccacagatttttcctgtggttctgtgttcctttttgtccctaatgttgatgaaataaacttctaaattgattgagatctgtctcaaattctttttggtttacaaaggtaagaagtgaaaatttcatttcagttctctcacaatctaatacctgaaagacaagcactgtaaaaaaattcagcatcaaccctttcaggcttttttccaacacataccttaataacaacatagtatgctatggtatactggtatacccatagcatagtataaacatagtatcatatataaaaaggactaatcctatagatattgttttgcaatgtgctcttttcatgtgatttaccaaaagcatctttccatgtcttacttttaggcctatgttatactattttgatggttatacaatatttcataatatggatataccataattttagttgtttgcaattttttattacaaaaatgctacaacaaacgtccttgaacagaattttaaaacatctgtgcaatcatttctgtgggatagatttctcaaattaaaatcactaggtgagaaaaagacataaattttaaagtttggtggaaatgataaattcctttccccagaaggtattgatttacattccctctgatgttgtatgagggttcatttctccacacactcatgttaataatgtaaattatcatcttttctaattttaccaatctgatggtgaaaaatggtattttatagctaagatatatacatatatttttggtcacattagactcctcttgtaggtttgatatttcttctgcgaaatatttcttctgcaagctgatcatttatatcatttgcccattttaaaaactactttgtattgattggtaagaattattggtaagaatattttgaatattaataattttatatatattgcaaatattttgtcacgccttttcattttgttccttatttcttcatctgcatgtaaatcttacttctttatatcatcagttgtgttcatcttttctttcttactttggattatatgttatatgtagccaggccttccatactcaaactataggaatatctttctatattgtccttttagcattattgttattattttatttatttagttatttattttgagacagagtctcactctgctccccaggctggagtgcagtggcacaatcctggctcactgcaacctccgcttcccagattcaagcaatttgcctgcctcagcctcctgagtagctgggattacaggcgcacatcaccacacctggctaatttttgtatttttagtagagatgggtttcaccatgttggccaggctggtcttgaactcctgacctcaggtgaggaggtccgcctcgacctcccagagtgctgggattatagctgtgatccaccacccccggcctccttttagcattattatagtatttttgcatttaaaactttaatccaactgtagttcattattgtggatgacgctcatacaaccatgaggtaaatatttggctttcttttacccagtaacagcaaacaactgctttgacttaatttcatttccttggcaactttctgacagataatatccatatttgtacttaaagttgaaaaagaaaacgagcaccacttttgcaatttttactcactgtgacctaaagaattataaccctgaaaatgtgctttggaagtctgtcatggttatttctctttttaggcatcttttcagggcacacccgtctctgcatcactgtctgtttccttgtgtcacaaatttctgttctttttttctctccctgttccctctcatttattttttctcctaatctctcctttttcttaaccacctataatgttaatcactttaaatgcttttgactcctttgttttggtagtttaattatatttcatagtctctatgcttctttgttttggaataagtttttatttatctaactgtgaatttcactagagttgtaaaatgtatgccgaacataggatttggggattgcaagcatttacagctgatattcaatttctttcttttcaccacaaaaacgattttagaacatgaaaaatatctttggagaaacaaaaaaatcaatttcctcatcattttatgggtctacatttttcaatataatcatatgggataaatgtttgcattctgctattggcttgtgaacatttacctatatttctatgtggtcttgttagggacagtatacctaagtggataaaaggctgtgtggttgaatttggcttcttgtttacaaaagagtgatccttagtgatctacttagcctctctgttccttttctctttcactgagatgagaaaacctatccttcccaatttttttgtgtgagaattaaaatgcagcaagaaaacacacactcataaacacatctgctttggcaaaggagcacatcagaagggctggcttgtgcgcgctcttgctctctgtgtatgtgtattatgttttatgttactgtaaaagatgtaaagagaggcacgtggttaagctctcggggtgtggactccaccagtctcacttcagttccttttgcatgaagagctcagaatcaaaagaggaaaccaacccctaagatgagctttccatgtaaatttgtagccagcttccttctgattttcaatgtttcttccaaaggtaagcataagagtcaaagaagtcccaacccagctttccctgaaagtgactctcagtaactcttttgctttttataggtgcagtctccaaagagattacgaatgccttggaaacctggggtgccttgggtcaggacatcaacttggacattcctagttttcaaatgagtgatgatattgacgatataaaatgggaaaaaacttcagacaagaaaaagattgcacaattcagaaaagagaaagagactttcaaggaaaaagatacatataagctatttaaaaatggaactctgaaaattaagcatctgaagaccgatgatcaggatatctacaaggtatcaatatatgatacaaaaggaaaaaatgtgttggaaaaaatatttgatttgaagattcaaggtaagtgttcattcccttaattgctttatttcagtgtgggtgctatttggcaagttggaaaatagcatttctaatattccccagcgctgacctctgcctccaggggggctatacaggaaaccagatgcatgtctcctgccccagtggagactgtggtccaatgcgggaatgggatccacacatctgatagaccctcaagtctacctgcctgcaactctgtcttcaggtggttacaggaatgtggggttgggtgaagaacctggattaaggtggcattaatcgggagggggacacaggtaggccgagggaaaaggcaactgttccaggttgctgatgaatcggcgagctaagagtggggcgagaagaagaggctgactggagagcagcgggcctttcatcgacagagcccatttcaagccaggctgccctgaaggaggagttatatggcagaaaagggctggaaacaacatatttaaggatgaacagcccttattttggatctgcttgtcagagtgatacaaggtggcaggtgatttttgctgatatgtgtagaagatgcacaaggtgtggctttgtatatctctgcctgtactgggaggacaggagtggatattgaggatggggttagggagactagttagaaagctgctgctgtaatccaagtggagtgaggaccaattaaatcagattttttttgcatgcggcctgggtatcattaggttctaaagctccctgggggattctaatgagctgccaaagtcaatcgccactggcctagaccaaagggtgcctctaaaataggaagaatgaggataataagggtcaggcatagagaaaggtggcttaggcaagggagagaaggtagagaaagtggaatcgaaatgccattgaagttgaaagcccggggggatgctggggaagtagtgacaagaagggaaaagaagaagctgcgcttgacttggggaggcagacaggaaccccagcatgagcacaggccagccattcagtgagcaaataagcatttctgtgcttcacacagaaaatatcaccagaagcagggaccccaccttcttcctctctgtctccagccccatcttcagcacctgggcctaccagcaatcccagatagtgtcagattgcccactccagcaatcccagacactgtcagctcccctgaagtgacaactttccacaccctagtcctgcaaccttgagtggagagcaccttgtagaaatgtagtggggttgagcatggcgctgaaaagggcctctgattatgggctctggaaaccacagatctcaggactccaaacagcacaaaactcgagtgtcctgttttgagtgtgagccctacgcgggggaccatgctggtgttttcacatttgggtcgcatttagcattgcggcggaaataatggctaccagttaggggtcaagtgcttgcttacatgatcttatttaaagcgcccaacaatactgagacctagttgttattatctccttgttatatataagaaaacagagacctagtcagaagcagcttgtccaaggtctcattgcttgacaggagcaaagtcaggattcaaactcagaggtctttttggcaagaatgacgaccttttctttttttttccaagcagcttcattgagataattcatctaccattcaatttgtccatatactaaaatggccttcagtatattcagagttttgtaaccatcaccacaatcaacattttcattgccccaaaaagaaacccttcaccctttagccgaaagacagtgacttgctttatgtgtgtgcacgtcaatgtcatacaacatcttgattcaacttgtagttggtcactattaccagacttaaggtgaccatggccttgggcaaattccctatctgctgtgagtctgcttttccaatgacaacttcaagggatattcagtgagacaaggtgtgtacaagtgtcctgcagtgcctggggcacaatgcctgttttctcagtgctaatgccctcccacatctctttgtttctccaagcttctctttttttttttttttttttaattgagatggcatcttgctctgttgcccaggctggagtgcactggcatgatctcagctcactgcagcctctgcctcccaggttcaagcgattctcctgcctcagcctcccaagtagctgggattacaggcatgtaccaccacgtccggctaatttttgtatttttagtagagacggggtttcgccatgttggtcaggctggtctcaaactcctgacctcaggggatccgcctgcatcggcctcccaaagtgctgggattacaggtgtgaaccacgcacccggcctccaaacttctcaaactccagtagttgtgcctgcatttccttcatgagggagttgctgctgcaggctgaagaggcaatggagggccccttagaagcagatgctagtagggaaggggttaatcccagcaactcagaattaaggagttctcatccatggaaggccttaggttggatcagttctaagacgctatcttagtgaatgtatacggaggtactactccacaagggtgcccatcactgcattattcatgttagcgaaatactagaacagtcagcagttagaaacttattaatcagttaaattaagaatgcatcctttaaaaagatgcatatatgcatttattgatgttcattaagaaaagaacttcataatataatttcacaataaaggggaaaaggcagactgtaagatcacataaattagttttaatttttaaaatattacatatatatatatagagagagagagagagagagagaggcagacagaaagagacagggtctcactctgtcgtccagcctggagtgcagtggtgaaatattggctcactgcagcctctgcctcttgggttcaagcaattctcatgcctcagcctcctgagtagtttggattagaggcgcatgccaacacacctggctaatcttcatatttttagtagagatgtatttcaccatgttggccaggctactcttgaactcctggcctcaagagatccgcccaccttagcctcccaaagtgctggattacaggcatgagccacctctcccagctgaaatattatattatttatatatatacatataaatagaaaatatctgctaaagatatacatgaaaatattattcattattgactttgagtggtggcgttgtgggtaatttttaatctgctttaaacttttaaaaatattttatcagcttgtacaatgattggagttgaaagcccacggatgctgggcagggagtgataagaagggaaaagaggaagctggcttggggaggaagacaggaaccccagcatgagcacaggccagccattcagtgagcaaataagcatttctgtgcttcacacagaaaatgtcgccagaagcagggaccccaccttcttcctctctgtctccagccccatcttcagcacctgggcctaccagcaatcccagatagtgtcagattgcccactccagcaatcccagacactgtcagctcccctgaagtgacaactttccacaccctagtcctgcaaccttgagtggagagcaccttgtagaaatgtagtggggttgagcatggcgctgaaaagagcctctgattatgggctctggaaaccacagatctcaggactccaaacagcacagaactcgagtgtcctgttttgagtgtgagccctacatgggggaccatgttggtgttttcacatttgggtcacatttagcattgcggcggaaataatggctaccagttaggggtcaagtgcttgcttacatgatcttatttaaagcgcccaacaatactgagacctagttgttattatctccttgttatatataagaaaacagagacctagtcagaagcagcttgtccaaggtctcattgcttgacaggagcaaagtcaggattcaaactcagaggtctttttggcaaggatgatgaccttttcttttttttctaaacagcttcattgagataattcacctatcattcaatttgtccatacactaaaacggcctttagtatattcagagttttgcaaccatcaccacaatcatgttactgtgttgctgttataagtagaaaaaaaatatttccattctgaagagacgggcaaacttcgtgacccaacctctagactatgtactaactctgttgctgaatgttgataatttccattttcttccttctcagtaacgcagaatcttgggatgagaagaaaacttttaatttaatttctgcatgcctatatatatcgggacataaatgaagtttgactatggtgttccatggggaaaatattggtgtctggaagtcagagtgggagggaatcattgaaaaataagctagtccatctatattatgaatggagagaaactgagagggaaaagtggcaagtctggggggaacaaagtaaagaatgagaaaaaaaaaaaacagaagacgaggaaaaggaaaagttcacacagctaggaagtgatggggctaagatgtagacctgagccatctaatgctaggcctaggcattttccttttgtggtgcaatctctgtgcgggagaggcaagaggtttgtgattatcgaatgcatgaattaccactaataatgtcagtgcctaacgatctgcccagggctttgccacatgttgctccttttgtgacaggtagggtatgtttttctgatccttttctgatgctctgaggagggccagcgtagaccctgtgagcaactgagcagctctgggctgggaaaaggcagaatcaagtctctggttcccaggcaggtgctctttttccctagagctttgagctccttggacacccacacactcacatatacccacctggcccactgctccaggaacttggtgggggcagaggtatccaaggtccccagtcacatgtcaatgtggtgattcctccaggatggggttcctggctgctgttaaagcattgcctttctcaaactctggaggcactttcttacccatactcctaaaccctgactgccatgttttaggtggtgccccaagaccacctactggacctctcagagccttgaacattttgtctgtaaatgggaagaaaaacatcagcctgtctgttagggttaagtgatgtcatatatgtgaaagcattttaaggtataagacagcatataaacattacatatgatacactatttagtggcataatgtatctgtgaatgtcatcagaaataatttttttctgaatgctctttgtaaataaaataaaataaaataatttccaaaagttgctagaggtctttgacattgttcccttgtccctaactgactccatcccccactgtataaatagatatgtttattaaaatcagaaaattgcctaaattgaactgaatctttactttctttttagagagggtctcaaaaccaaagatctcctggacttgtatcaacacaaccctgacctgtgaggtaatgaatggaactgaccccgaattaaacctgtatcaagatgggaaacatctaaaactttctcagagggtcatcacacacaagtggaccaccagcctgagtgcaaaattcaagtgcacagcagggaacaaagtcagcaaggaatccagtgtcgagcctgtcagctgtccaggtgcgtggcgggcatcacttcacaaacacagcctgccaggccctcagtaggcagaggcatgctgctccaggtcacaggtgctcatgctgggaggcagccctggctcaggatgaggcatgaaagcatatctcttcctcctggaaaccttcaagggaagcatcaggggaggtggtgttctatggttttccatcctgggagtcctcccactgagcacaatttgaccacaagaaattttaaagatcctcttctaggagaaagaattgcaaaactgaagaaggaggagctgtagagagtatctcatgcaaagccccattttccagagagggaaactgacttgcccaaggtcccttggctagttagtgacatgattccaactgctcccctaaagatggttagtggtcagcacctcccatcaggagtaaaggtagaaaggctgcagaaaccctggggggcagggtcatgggggaatggagcccttgaggccaaagaggactgtggacagcaaggcaacactcctggcacacaacaggacggcaaggcttggggactagctccagaaaatctcaaaactccaagaccataatggatccccagtgtcccagcctgatgtgacctccagaagtatttctgagaggcagccttctatagtgcccaagctctcgcctgggagtagaggtctggacttctagtttgggtctgtccaaatttagccagagaatcttgacagagtttcttcccctctctaggcttcagcttcctggcccacaaagaaaataagcaccatgttcacagactattagatgagtaggctcttggatccacttccaagttcattcatgtgggccgttgggctgcctcacaatatggcagctagcttccctcagagccctctaagaaagagcaggaataagtgcccaggacaaaagtcgtggtctttttgtaacttaatctcaggagtaatatcccaatcacttctgctgtgttctgttcattagaagcaagttaataagtctagcccacattcaatcagaggggattgcacataggtgagaataccaggaagcaggggtcattgaaggcatctgagagtctgccaatcaccaacttgaccagcatcacttcacccccggttttcccaccagtcatcctcccacattcccccatcactaaggcacagtaagtgaagttgcctctccttgacttcgcaactttttttgagacagggttttgctctgttgccaaggctggagtgtggtagtatgatcatagctctcagcagcctccacctcccaggctcaagcaatcctcccacctcagcctccccagtagctgagattacaggagcatgccaccacacccagctaatttttaaaattttgtagagataaggtctcactctgttgcccaggctggtctcgaactcctgtgctcaaactatcctcccacctcagcctcccaaagtgctgggattataggcatgagtcactgcagtggcctcgggagatctttgattagagttgccagatatagcaaataaaaatacagcataagtacgtttcagatattgcatggaacatacttatgcaagaaatttttcattgtttatctgaaattcaaatttaactgggtgttttgcattatatctggcaaccctacttttcatgtttattttaactggagcccacaagtataaatatgtgtgtgtattagggatggaaggagggagagagggaggaccttgggagcagccaaggtttgaaggctggaacacttatgtcccttactctatggtgcagagcagaagctcattgcgagaaggaccactagggagatgggaagaatacctggggagagattagggtggaggagctgctcttgaagacccgaaaagggatttggaagttttattctgaaaggccaaggcagagaggagcaatggtcagagtctgaccatttggctcagattaggtgagtgtttacatacttaaaatcaaaatactaggaggaaggaacagattcagatgcacaaaaataatttgtcacataaactcatgggcatgtgatctccaagagatactgttggaagatagtatgcctggatttaggaactgggagggcatatttttgactgacagtgccaccgctgcttctgaaacatgatggaacattccccaccaaaagtactaccaggtgccccagggcaccaccctggacaaactggagagcaggctgtgtaaggcattgcctacattcctgcatgtgcccaagataaaattgtggccaccctacccgatgacttggagggaagatggagctggtggctgcatgacttagccatgtgctccccaaagcatttcaggcctgccctgccccaccccgggtcaaatctgaaaagttctcaagctcagcaggaagtggcctctggtatctcctgcccctcgtccaagccagcagggcctaaagggccctgaatcctttactgacccaatttcaatggtttaagattatgtctgcttctctggtggaggcctcttcatcagtagagcttagagagttgtgtaactggcaggcaaagaatgggtcagagagagactcgaggaaagaaagccaagatgaataaaccaccacagtttgatgatctgttaaacttggtttctgagcctctgaccctctccttggggcccatcctgggcttcatgtataacagtgtctccctggtatgtttttgcctggagaagcatttcttttgtgatgctgggccaagttccagtttgttcttcagatgaccccgtcccctgacccgagccccactgctgcttttctaactgctattgactcacaaagggcagacagccctagaacccctcctgtttcccctgttgctgggaaacagctcccagaaacaccagtgcgagaacactagtaagagcaagacctcacatttgtgttgttttacagtttacaaagcactttcatatccattatctgattgacttccaacagccaccctatgatgtaggtttcattatctccactttacaaagaaggaaacaggctcagagaggtgaagtaactctccaaagttcacacagctcctgcctaaaaaagcctagaccaaacccatttcccttaacaccaaagtcactgttttcctcattgcattacagtgactgaaggtccagcaactgaagactaagcccactgctgttactaacgcactgtgcacccgggtttctctcgtggctccagggaaactctgtgagagggtgctggccgtgaggtcagagtgctgggctggacaagtgaaatatttaccctgagtgtttggaaactgcctggtagagacagtgagaaggaatcatggtgcagtgggggtagccagagacgagagcaggatcaacagtgcagaaacaccgagacaaggggctgcttaagggaaatgctcaggaacagatattgtgtggcttcgggcaactcattctccctctcagggcctcatgtttgaagctagaggttgcatttagagtatctctaagatcctcggatctaaaatttcgtgatgctttccatgacgggggcagtgggcaggccggccttggtgcatgaacaatcaggcatttctagcccctgagagcagtttcccaaagagcctgcagagggagcttcccaaggaccttgggtccttccagggttgacaccactcaccaccctctgtgagcctgggagttatggggtgaaaggtcccaacaagctcttctatctgcttgatgcaggaggcagcatccttggccagagtaatgggctctctgcctggacccctcccagccatcccacttctcttccttttgcagagaaaggtctggacatctatctcatcattggcatatgtggaggaggcagcctcttgatggtctttgtggcactgctcgttttctatatcaccaaaaggaaaaaacagaggagtcggagaaatggtaagctccccctcttttgtcccaccgcaggccccagcaaaatccccatgaaacagctcatggggatgacaccttgaatctgcagagaaaatgatggaaataggtagtttcggaatgtcagggttgtagtcagcggttatagcttgtttcattttgtggttagcttgatttttgaaaaacaaattcttagtggtgacaatgtgggagctttgagacactgaatccagttggcctcattggaatccaccactgaggcctacttggtgacaggctaatgtgaacatcttttgaatgagccacacttctctacataggcagaaaggttagctccaaaacaccgtttctaggaataaatgtcctatctatgggtggcccaaggtgagttcaggaccaagctcctagaaacacagggaaaatcattcaggtcatcaggtagtcacaggaaaacagctgttctaaagcagggtgcctgtgccccctttgctaattctctgttcgagggatgtgttagggttgagagtttttcctcagatcaggcctgtctgacaatctatcagcaatgaaaaggttatgcttgcaagtggggagccggcttagggagcatccaggccacccaaggcagaacacttcagagaatggccaacccggggtcactgtggggggcacagatgagggtgtcagccattggcgggacttgcagccaagggaacaggccctggggttctctgcaattcacgttcacagcaggacttggtctctccctagaaccggcaggcacagccacaccagctgcttccagtgctgcccagggaggtggtccaaacttccccaggcaccggtggccttgggccccgtgccctctggatttggcttctttacctcagatttcttcctcagttctccttctgcctccccatcaggctgcggtccctcagccccacgtcccatcacgtcactacccccagcccaggccccgaaacatcatcctgaacttagtcccattcttcccaccacgactgtcccacactttccaccacagcacagcagaatcgctggcagggcccttaggcatgcctggcttatcctcctctgtgcccagctctggctgttctccatgctcctctccatgctccttctccattgactaatggtcaaagaccatatcttcttccaaggtggacctcacttgtcaccccaagacaaggcaatctctgccatcaccaggctgagaagaatgatggttagctcatgctgataaaaaagtcgttagtctctgtgttttatgtctattagtgcatccagctttcagagtgatcttaggagatagataacaacacagatgaggaagcttaagttcagtgaggttcaattatttgccttaaatcctatggccagtaggttgactcaggcctaggccgaggcaaggagcccagaatttaaggcatagaatttaaggaggctggcctgcccttgcacaacctgaaagttggtgtgtctttaaactgcatgcctgtcagcctcgcttgcctcattccagtcatgccctgggttgagtaaccaggagatgcaaacaagggagaaggacaatgagcctggaggaattcctgggagcacacatttaggcgccagctgcagctgctggagtgggtaggctgaggacccactgtcctgcttgaaccaggcagggtgcacagagccgtagccaaccttgtctgtccaaccctgcctgcagtctcagccatgtggctacaccccattcctcctaccagagctcatgtgcctctgtctacactttctggtggccctgggctcttcacagaaattgacattgcgattttcagttcttgtttgcctcttacttgattttaggcttcctgaggacaatttgtgtctaagtcacaatgacacttaacacttggaagatgaggaataaatgttggaaggacaaatgaaccaaatggtgtatgggccaagtgtggtggctcatatctgtaatctcagcactttgggaggccgaggcaggaggatcatttgagctcaggagtttgggaccagcctgggcaatatagtgagacctggtctctactttaaaaaaaaaacttaaaaattaggtgggtgcattggtgtatgcctgtagtcccagctagtcaggaggctgaggtgggtgaatcatttcagcccgggagatcaagaatgcagtgagatacgatcacacactgcactccagtctgggcaacagagcaaggccctgtctcaaaaaaacaaaacaaataaaaaacaaaaatagtgggtgaacagagtagtaaaccaatggccagtgcaagcttgccacataggagatgaagaaggaccacccactgccccataattcagaactagggccaggggttagagccctctccacagtctactggacataacctaagcaatgactgcagggcacggaagatggcatagaggatgtgttttgtcctttctggaggccctttcctctttgtgcttagagcacacgagccatttaggtatcaaaatcacattgtctaactttgactctacactcaaagccatctgatgctcacatttcatgtagtcagaggaggccatctggtttgaatcaacatccggaagttacagggtgatgcttagagagggcttgtgcttccccagccacacatctccataaagatgtaagaggtaattatttcagctgggtgcggtggctcatacctgtaatcccagcactttgggaggccaaggcaggcagatcacctggtcgggagttcgagaccagcctgaccaacatggagaaacgccatctctactaaaaatacaatattagccgggcgtggtggtgaacgcctgtaatcccagctactcaggaggccgaggcaggagaattgtttgaacctgggaggcagaggctgcagtgagccaagatcgcaccattgcactctagcctgggcaacaagagtgaaacttcaactcaaaaaaaaaaaaaaaaagaggtaattatttcaccccagggaaaaacttctcttcctacctccctctggagccactgcaaagacggccttgggtgcagggactgaaatacctaacttacagcctaaaggagtccagaggggccagcagggtgctccaggcctctagcagctgggcaccttcacagattccctgtgattttaagagtacaggaaaaactacattacgagtagctgtaggcctgctttcatggactgaagtcacacaaagaagaaaatcctgaagggtgaggagaggaggagttctttccctcctaaggccaagaacataggtcttgaatttctgagaagcgagtaaatttctaaggacaaaaagttccttgcatgtgttccaacctcttgccggaaggtggattgcatgacagtagaattgggggaaaggcagatctaacatagaaatgcctcagaaggaatgtagttactaatatcctccatgactgctcataaccccttcccatgcgctctaaccatgaggttcttgctctcagggaacaatttctaggtcagcacagaggtagggttccaggtctgcgtgctctctctgatcatgggagccccaggcacaaagccctccacccatgtgtcttcttcctgctgattccttgagttctcttgtcctaggctttcactctaccttatggtgagcacttctttctctcctacaagcttagagttctcagatagtaggggcaacttctgcttcctcattgcatcccccaaagcagctagcatggcgccttgcatataaaaggtactcaatatttacattgatttcacctggccaagatgaactctattgaggttttgttgttgcagatgaggagctggagacaagagcccacagagtagctactgaagaaaggggccggaagccccaccaaattccagcttcaacccctcagaatccagcaacttcccaacatcctcctccaccacctggtcatcgttcccaggcacctagtcatcgtcccccgcctcctggacaccgtgttcagcaccagcctcagaagaggcctcctgctccgtcgggcacacaagttcaccagcagaaaggcccgcccctccccagacctcgagttcagccaaaacctccccatggggcagcagaaaactcattgtccccttcctctaattaaaaaagatagaaactgtctttttcaataaaaagcactgtggatttctgccctcctgatgtgcatatccgtacttccatgaggtgttttctgtgtgcagaacattgtcacctcctgaggctgtgggccacagccacctctgcatcttcgaactcagccatgtggtcaacatctggagtttttggtctcctcagagagctccatcacaccagtaaggagaagcaatataagtgtgattgcaagaatggtagaggaccgagcacagaaatcttagagatttcttgtcccctctcaggtcatgtgtagatgcgataaatcaagtgattggtgtgcctgggtctcactacaagcagcctatctgcttaagagactctggagtttcttatgtgccctggtggacacttgcccaccatcctgtgagtaaaagtgaaataaaagctttgactagacccgtgtctgctcattgtgtgaaggatcccagtgtcgaggagaggaagctgccgaataagaaagagcctcgctggtgtgacagcaggatcaaattcagtcaactcaatccggctgagacctccttagtcctcaccagaatgacccgaacatgctccccaggtctcagctgcaaagctgggtccaacaacctatttgtagatttccataatgaattaaagcctccatgcacaaacgttaacaggagtcaccagaaaacttaacattttaggtcttactttcttgactgttcagacacggtcataatgacctgtactgtcatccttcaaaacaagggaatctatggatactggaggtgtcatgaactcatcagatgacatacaaaaagataggctaagagacaactcagttgaatcaaatcttaagtgtcttaaatgactatgattaaaaggtcagaccccatccccagctagcagtcatgcagctgtactttgagggaagtggggagaaaaaaatagttttcagttagagttctaaaacaataggtggtgagaaggcacctgctttgaaatgctggtgccttgtctgtggtcctgtctgcccgccttctccttggcttcttagacttgctaaaccttgttacactctggcaggaagctctgagggctaaaccacaaaaactaagtacattcaggacttcctgtgacagctcactgaggattgaactactttttcctctgaatctgagagtctatttttccagcaaccagagttaattactaagggcaatgatgaatgaaacctcatcgcctcccaaaattcaaacacaaaatccagctaggtaacaattgccacaggatctacccagtagagagatgagggctctggccgggcatggtggctcgtgccagtaatcctaacactttgggaggccaaagcaggtagatcacctgaggtcaggagtttgagaccagcctggccaacatggtgaaaccccttctctacttaaaaaaaaaaaaaaaaaaattagccgggcatcgtggcacgcacctataaccccagctactcgggaggttgaggcagaataattgcttgaaccctggggtgtggaggttgcagtgaggtgagatcgtgtcacttcgctctagcctgggcaaaagagcaaaactccgtctaaaaaaaaaaaggagagagagagagagagagagagagagatgagggtcctagctctgcccctttctcattcttcatgatacccatgagtgatttcattggctatctcaccagaacagctcatacgccattcccttaagaaaatcttccctggtctattcagccctgggctctgcctttcttctgaactcctgtggcattacatatggtacaaaacacatacaccctattcaatccttcatcgttcattcattcaacgaacatttattgaacttctactatgtgtcaggctctgtgctaggcactaggaaaacagaggtgtacaattgcatctctgctttcaaggagctcaccacctggtaggcaagaaacggaccaaccatgggacaaatgcaatgcagtatgataaatataggtcagaggcaagtgcatgaacccagaggaaggactttgaacccagactgagtggtaagactggggtgacaaagagggcttcctagaggagggacgtttgggttgcgttgtaatagattaattgaactggtgaagcagaggtacagaattacccatgtagaggcaacagcatgagcaaggctcatttggctttctgtttacacaaacatgtagtttctttttcaactactgtatttaactgatttgaagatgtcattgatttttcaactactgttttcaactttttgtatttctttttcttttttaacaactatatttaactaatttgaagatggcattgattttaagtggcatcattcttttacatgccactaagaaagagaagaacacttctcagttgcattgtaacaaatactaagatacagtcaactttcagtcacaatcccattcctgagatattaaaatgtgaaaaaatgttattttatgttagtgcattttagaattgatgaaatgcatagtaaagaagctttttgagtacaatgaccatttctcaatatcgctgccagcactttattgaagctatcattagccaattgattcaatgggtgagcccagtcctgatgaaaggaagggaagtgaacatacacaacatgcttgtcctccttatccagggaagataagacagattctctgccctgcaccaccattaggtgggaaacacgaaccttgcttaagatttgtgctgctgtcacccacctgtctgacactgtgtgacatcccactgaacctgccccagagcatggacattctgagaagtagtcaggccagctgcgtaggaatagcttgtagagcttgtgaaaaaaaaaaaaatgctgacacttctgtcagtcaggttgggggccaaataaacatatttttaaacaacctctccagctgattccaatgggcattcaagttgtagacaaccttggagactatagataatgcagtattgtaagaaaaataaacagttgtagcccagttagctattcccccacaagcaaatctccaataagaaggccaaccatgttggaaaaaatatccacataatttaaggcactggaacatcgcagaggtttatatgaagacagaaaatttagaggtttctgatagcctatctgcccaccctaaataatagtctaatactagcagctggaccagcttagctccaaaagggtctcaactgtaaactgggaaatttcatctcagtcctcctgctccttttcctttgctaattttctaatgttaggctccttacccatgctcagtgggttgcagtgacttggtgactcaagttcaccaataagtttgccacctcaggaccactgtacatgctgttcctattatacatgctgttcccactgcccacacttttcacctggctcttcacctgtccacattcttctttcagagttcagacagaaagtcatttcctgggggagacctttcctaactcttgaactccactgtaacgtgaatcttgtgtgagaccatctctgtgtccagttctgtgcccatgaagttcaatgtagtagaagactcacaggtatcgaagccaggaagttctgactctctctctcactggatttgtaagcttgagtaatttattcagcttctgtaaacactgattttctcatctgctaaatgaggataacacctcacaaggttagagtgaggactaaatggaaataatgtatgtaatgtaacaaatatatccttgtgtacagaatgcatctgaaaactgtgagctttatttctggcatgatactcaagaaggaatatcctggatggcacatataaatgggctagttattggaaagacacacagctcattataaattgataaataagcactctgtaaggtgacttagtctgctatgagtttgattcatctgagtcagtttcataatgttgcctcacatggaacaaatggatgataaaatcctacaccagaggtatttaaagctaaagaacagacctgtgaggccacctcgcaaatcctagattgagtcaccagccttctgtcacttccctggcttcataagcagggttttcctgaagaaaaaatgccaggacattacttaagtacatggcatctttctggtttatttatagcaacacagaacaaaaggatgaggaaacaagggaaaattctgatctttttaattgcctaccagacaatgacattacaaaaaagaaactacaggccaacaactctcacagatacagatgcaaaatttttcaaaaaatattaacaaatcaaatttgactgacaatgtataaaaaggactatacattacaaccaagtgggattaatctcaggtatgcaaagctggttcaacatttgtaaatcaattagtataatctatcatatccacaagctaatgaagaaaaatcacatgatcctataagtagatacaaaaaaagaatttgactcctgtttatcaacacctgtttatcaaaaaaacttttggtaactgggaagagagggaaacttcctcaacttgattaaaaaaaaatctacaaaaaagacatgcacctaacattttacttaacaatgagaaactctaaactttccagtaagatcaggaatcaggatgtttcctctcaccactgtttctcaacatcatattagaagtcttagctagtgcaataatacaagaaaaggaaataaaatgtatgcaggttgggaagaaataaataaaactatctttgtagatgacatgatcgtttgtgtagaaaatctgaaagaatcaacaacaaaataatactggaactaataagggattatattaatagcaaggttgtattaaataattcttacaaggttaatattaaaaagtccatcagtttcccgtataccaacaatgaacaagtgcaatttgaaattaaagacataataccatttacattagcactcaaaaaatgaaatacttaggtatagatttacatgaagaaaactacaaaactctaatgaacaaaataaaggaagaaccaaataaatggagagctattttatgttcatggataggaagactcaatgttgccaagatattaattcttcccaactcaatctgtagattccgtgtaatcctggtcaaaatctcagcaaattgggctgggtttggtggctcttgcctgtaattccagcattttgggaggctgaggtgggcagatcacttgaggttacgagtttgagagcagcctggccaacatggtgaaaccccgtctctacaaaaagtacaaaaattagccgggcatggtggtgtgcacctgtaatcccagctacttgggaggctgaggcaggagaatcgctggaacctgggaagtggatactgcagtgagccaagattgtgccactgcactccagcctgggagacagagtgagactccatctcaaaaaaaaaaaaaaaaaatccctgcgaactattttgtggatattaaagtgattctcaagtttatatagagaggcagaagtcccagaatagccaatataatattgaaggagaacaaaattggagaaccaaactgccccacttcaagatgtactataaagctacagtaatcaaaatagtatggtattggtgaaagaagagacaaatagatcaaatggaacagaatagagagccagagaaacccatataaatttcatcgtcttgtccaagcttgtccaaccctcagcccgcgggcaccatgcagctcaggatggctttgaatgtggcccgacacaaatttgccaactttcttaaaacattatgagattttttttctgtactcatcaactgttgttagtgttagtgtattttatgtgtgaccccattcttcttcttccagtgtggcccagggaagccaaaggattggacacccctgatttgacaaaggagcaaaagccaaacaatggagaaagaatggtctcttcaacaaataatgctggaacaacttgacatccacatacacaaagagaaaaatgaatctagacacagatttaacagccttcataaaaatcaactcaaattaattacagacctaaatttggtggcctggatactaaatttatttattttaaggaatagtacaaatcaaagaacttaagtggatgttttggcataacttacagaaaaggtaaaggaaaccccaccgtgcaggcactgcttcggtccagagaggtcaccccgtggctacaggaaacgagcctaaggcttagctgtcattatccctctctcccagagattctgccaggccagatgcccggctctcgtcctgcacaagttggtcacgtggacacccaattctttgatggatttcactggttcattgaggtaatgtgtctcaataaggtgacacaagcgggagccgtttttacgcagttccaatagtgaccgattcacgtgttttccaagtgtaagacacactccatcgcattcagccggttctccgcctggtgtcttgactcctgaaggaagactccgccccttcgttgtttctgcagcttcatcggtttctcagcgggctccctctcctcatgagattagtgaagaaataagtttttggcaaaattcctcaaagctacgttatggcggtgaaagcatcagatgtggacaggtagatggaggaggctggagcgccaggttgaccgggggcctcagggcggtcccagcgcacggtgaggaggtggaagctctggctctgagccgccagccgctggggcacgggaaaagcgccagttccctccaagcacaggtgaagcaggaaaccgcggtgactgtcggcgaagaacatctccagacctaaatattagatgcaaaattataaaatgcctagaagataatcggagaaaacctggaggaccttggtcttggcagtgactctttagatacaacatctaaggcaagatccatgaaagaaaaaattaataagctagacgtcattaaggttaaaattttcttgggtaggtttagtggatcacgcctgtaatcccagcactttgggaggtcaaggcgggaagattgtttgagcctaggagtttgataccagcctgggcaatatagtaagaccctgtttctataaaaattttcttaaaaaactagcccagcagggtggtacacacctgtagtcccagctactagggaggctgtggtaggaggaccacctcagctagggaggcagaggttgccatgagccgtgatcatgccactgcactccaacctgggcgacagagcaagaccttgtctgaaaattaaattaaattaaattaaattaaattaacatttttttgctctgtgaaagacagtcaagaaaatgaaaagacaagccacaggctatgagaaattatttgcaaaagacatgccagttaaaggattattattcaaaatatacaaagaactcttaaaactcaacaataagaaaacaagcaaccagattaaaaatgaccaaagaccttgacagacacctcaccaaaggagatatacagatggcaaacacctaagcacacaaagagatgctctatatcatatgtcatcaggaaaaatgcaaattaaaacaacaatgagaataccgctacatacctattagaatggccaaagtccagaatactgacaacactaaatgccagtgaggatgtggagcaacaggaactctcaaacattgctggtgggaatgcaaatggtacagccacttttaaagacagtttggcagtttcttataaaactgtacatactttccccatacaatccagcagtcatattccttggtatttaccgaaagaagttgaaaacttgttcctacaaaagactgcccacacatgcccagagcacctttatttataatgacaccacttggaagcaaccaaggtgtccttcagtaagtgaacggataaataaactgtggtacatccaaacaacgaaatattagtcagtgtgaaaaaagtgagctatcggccaggcatggtggctcacacctgtaagcctagcactttggcaggccgaggcaggtggatcacttgaggtcaggagttccagaccagcctggccaacatggtgaaaccgtctctcttctaaaaatgcaaaaattagccaggcatggtggcatgcaccttagtcccagctactcgggaggctgagacaggagaatcacttgaacccaggaggtagagattgcagtgagccgagattgcactactgcactccagcctggatgacagagtgagactccatctcaaaaaaaaaaaaaaaaaaagttagctatcaagccatgaaaagacatggaagacttagatgcatattactaagtgaaaggagccaatctaaaatgtctacacataccatatgattccaactatatgacactctggaaaaggcaaaactgtggcaacggtaaaaagattagtggtcgctaggtgtcagatggcaggaagggatacatagcaggagacagatacttttcagagatttgagaatactttgattgatactataatggtggatacttgcctttacacatttgttcaaactcagaatgtacgtcaagagtgaaccttattgtaaactatgggctttaggtgataatgatttgtcaatgtagacttatcgattgttaaaaaatgcaccagtcttggttggggatgttgataatggggaaggctatgtgtgttggcggagataggggggatatgggaaatttctataacttcctctgaattatgctgtaaatctaaaactgttctgaaaaataaagtctatttttttaaagtgcttaccaaggacctagcaccatgaaagaaaatgtattcacaccaagatatatgattgtaaaacttcagaacactgggacaaagattagaaggggagagaggaaaaggggtaaggggaaggaagaagaaaaaaggcagtggagagagagacagagagagacaccataccaagtatcaagaattagaaagaattagaatagcactggatttctcaacaactatactggaagctagaagacaacaaagcgatgctttcaaattctggggaattttcagcttagtattctaggcaaactatcaactatgcatgtggcttatagagaaaacatgtgttatacaagcttttctgaggcatgagtcatagtgctggtggccatgagttcaatgttaatgcatcaacaatatatctcaaataagatgtctttaaacagaaacacacataaaattaggttttgtattgatcagttgactcactgtttactcactcagtgttaaggctcacaggaatctaaccctgtatttcccctgggagcaatgtttcagtttgctaagtcagtgtttgcaataactttacagagcataactaccatgaatagtgagaatcggctgtatagacttttccttttctttctttttgcactgtcttcagattacctcttctcatatccccttttccaccactggaccaactacactgttgctgatgattgctgtggtgatgaggcaggacgggagtgaacaagtagagagtttaccagctctcccctgtcctttccttctctgccccagtttgcagacacccatcccccaacatgtgcttgctcacattctggttcaaaagagccttcagtcttctcagagggttctcaattatatgttagtttatcatgtccatgattatttctcttttgtagcttttctctgctatagttctgtagtttacagttgtggaggaaggtaccagcagtacaagctggttcattggcttgtcaaaaacttgatcagggaggatgttagcaatatgatgcaagaacaaccaagaagaaatatcaggtatgaaaaatataactgttgaaacaaaatgcataatagctgaagtatgaatcaggatagatacagctaaggactgaattaggaacctgcaagatcattgcaaagacctatgcaagaatgcaggggaaagtaaaacagcttttctttaaaaaaagaaaagaaacaatagggatatgaaggataaaaatatcagtattcagataatagagattccatagggagaaaaacataaagttgaaaattgagcctataatatagagccaaagagagagagagagaaaaccccaaaattagacattttactgagaattagaatcatcaaagactgcaagaaatttttagaatgttttcagagagaaaaacatacaaaagaacaagcattagattgacctgagacctctcagtaacaatgctggatgcaagaagacaaagaagtaatatttttaaagtgttgtgcagtcatccctaggtttatgtgggggattggttccagaacccccatatatatatccacgtctgcacatgctcaagtcctgcagttggccctgtagaacccacccatgtatatgaaaag

SEQ ID NO: 812 - DNA, 1531 bp, Homo sapiens
cagaatcaaaagaggaaaccaacccctaagatgagctttccatgtaaatttgtagccagcttccttctgattttcaatgtttcttccaaaggtgcagtctccaaagagattacgaatgccttggaaacctggggtgccttgggtcaggacatcaacttggacattcctagttttcaaatgagtgatgatattgacgatataaaatgggaaaaaacttcagacaagaaaaagattgcacaattcagaaaagagaaagagactttcaaggaaaaagatacatataagctatttaaaaatggaactctgaaaattaagcatctgaagaccgatgatcaggatatctacaaggtatcaatatatgatacaaaaggaaaaaatgtgttggaaaaaatatttgatttgaagattcaagagagggtctcaaaaccaaagatctcctggacttgtatcaacacaaccctgacctgtgaggtaatgaatggaactgaccccgaattaaacctgtatcaagatgggaaacatctaaaactttctcagagggtcatcacacacaagtggaccaccagcctgagtgcaaaattcaagtgcacagcagggaacaaagtcagcaaggaatccagtgtcgagcctgtcagctgtccagagaaaggtctggacatctatctcatcattggcatatgtggaggaggcagcctcttgatggtctttgtggcactgctcgttttctatatcaccaaaaggaaaaaacagaggagtcggagaaatgatgaggagctggagacaagagcccacagagtagctactgaagaaaggggccggaagccccaccaaattccagcttcaacccctcagaatccagcaacttcccaacatcctcctccaccacctggtcatcgttcccaggcacctagtcatcgtcccccgcctcctggacaccgtgttcagcaccagcctcagaagaggcctcctgctccgtcgggcacacaagttcaccagcagaaaggcccgcccctccccagacctcgagttcagccaaaacctccccatggggcagcagaaaactcattgtccccttcctctaattaaaaaagatagaaactgtctttttcaataaaaagcactgtggatttctgccctcctgatgtgcatatccgtacttccatgaggtgttttctgtgtgcagaacattgtcacctcctgaggctgtgggccacagccacctctgcatcttcgaactcagccatgtggtcaacatctggagtttttggtctcctcagagagctccatcacaccagtaaggagaagcaatataagtgtgattgcaagaatggtagaggaccgagcacagaaatcttagagatttcttgtcccctctcaggtcatgtgtagatgcgataaatcaagtgattggtgtgcctgggtctcactacaagcagcctatctgcttaagagactctggagtttcttatgtgccctggtggacacttgcccaccatcctgtgagtaaaagtgaaataaaagctttgactag

SEQ ID NO: 813 - protein, 349 aa, Homo sapiens
MSFPCKFVASFLLIFNVSSKGAVSKEITNALETWGALGQDINLDIPSFQMSDDIDDIKWEKTSDKKKIAQFRKEKETFKEKDTYKLFKNGTLKIKHLKTDDQDIYKVSIYDTKGKNVLEKIFDLKIQERVSKPKISWTCINTTLTCEVMNGTDPELNLYQDGKHLKLSQRVITHKWTTSLSAKFKCTAGNKVSKESSVEPVSCPEKGLDIYLIIGICGGGSLLMVFVLVFYITKRKKQRSRRNDEELETRAHRVATEERGRKPHQIPASTPQNPATSQHPPPPPGHRSQAPSHRPPPPGHRVQHQPQKRPPAPSGTQVHQQKGPPLPRPRVQPKPPHGAAENSLSPSSN

SEQ ID NO: 814 - DNA, 108526 bp, Mus musculus
  misc_feature (1)...(108526): n = A,T,C or G
ttcatatcttacttctacagtgtcctaccagagtggtgttgggaacatcttataatctcctgtgttgtgttctctttgttttatctataatacactatcactactacttcatgagggttatagtattaaattagattttatatgaaacactttgtacattgcatggtgaattgaataaaaaagagagcactatttacatatcctctacacagttattcttaaagacttcagttaattcaaagcatatactaaccctacacttggaaaataagaacattgcaattcagttttatttttctgctgagcaagtagataataatttcagagagttattagatatattggaatgtatcttagtttaaaataaactaggtgggtgatgagcagttgatcttctaaattatttaaaattagtatacaaagtagcaagttcccttatgacattttcatactaattagtttgtttttctgctcccctctccccaaacccattcttcttctccatctccttgccctcactctccatttacacattctggctccagtacttcccctttctactttatgtcacatggtctattactctccttaatctacttcctaaaattgtttcccgtctcatgaacccctttctaagttcatgacctatactcacactcatacctctgtaaacacacagaaaaaaaaaacacacacacacacaggaaaaaaaaattcacatatctatttgtatacagacctggactagagttctcttattgtttcctatatcctgaaccgatagctcaatcccaatactttatacacacacatttgcaaaaatgcacacatctcccttgcaagagtattgaaaggattatagataatggatcctcacacaccataaatagtcactaagtagacactattgtttttatagttttgtagttaagggcttgggatatgaacatttaggcaacctatgaagaatattgaatttgaatcttctggacaattgactaaaggagactataaataaaaacatcttagaagacatattgagagagaagagggatggaagttgccctggagtagatggattgtaagcaaatgaccatgagggctggcctgacggagtagatgtggcccaagtggaacatggttctcaggatcaaacttgtcctaactcttgagaacacaatatactgaaaaatccaaggaaactgaagggaaatctcccatcacaatccaaaggagaaaaagacaaggaccagagcttctaggctggaaacggacactccaagaccacacagctagagagtttgttgtggtaatctgttaacatgttctgagctccctgcgggtgatcttggttcttgtcactgccagagttctctggattcatgaatgaaaatactctctctctctctctctctctctctctctctccctccccccaccctctcccttaaaccaggattcacctcccctcccccattctacctggaactgaaacgttgggttaaggtccctgctatcagcatctttcatgaatttccttcatctcattagaatatcatctctatattagaagctctttgagtgaggggaaacaaaaccaaacaaccctcacccaaaagagtaatggtatgataaaaacaaaacattattcctgagctaagtataagtttattagttttggacaggagacaacttgcttgtatgaattgctttggcccttttgtttaaattgccactcagattaatagaatttaagtatggggtttgctcagaacagcactggctgctcttccagaggactcaggtttgattcccagcacccacactaaccatctgtaacgccattttcaggggaactgatgccctcttctgacctccaagggcggcagccacacacatagtacacaggcatatatgcaggcaaaatattcatacatataaaattaaattaaatttaaattaaaaccaaccaaacaaaagacatattgattgcatgtttatctataagcatatcttactaaatttaactcatttcctagtgcttgcagtgccaaattgaaactaagattttttttctcccctgctcagaatgactgtgtcttggatatgctccttgaagtaatcacaagattcattaacttcatctccgtccatctccaaagcagcagaaacacctactcaaatataggagatgtgtgatgcagtttcctataacaagttagtaaatgtgcaggagtagctcttttttttttcccccagaagaaatagagctgcatctgtagaaccagcagattaactcattagtgctgggttgttgcttcttatttcactttttatttggtattaatttccagacaacacatatattctcataaatgtaagtttctgcaaacatatcatactgtcttttggttgatctccattcttttagttttcattttagggagcttgcattttcaatatgctcagtgattttctgggtgaggagaaattctagaaaggattaattcactacttaaagaagcacagctacaaaaaaatgccaggaatgaaaatttatgggatagtctgtccagtgtaagccctatgttgggttgtagtagactggtaagcctaaaatctaataggctaatgatgttttaataggcatgctgccatcaacacacattcctgcttgaagagtccttttttattctattttgtccccactcagaaaccaggccatggaccatttgctatctatctgggtggaaggtactttgcttctgcagctgcctgtctgagttgctctgggcctggaggctgcagtctccagtttagcacctcatagtaagaactctttgtatatattggatattagtcctctattggatctaggattggtaaagatctttccccaatctgttggttgtcattttgtcctattgacagtgtcctttgccttacagaagctttgcaatttatgaggtcccatttgttgatttttgattttagagtataagccattgatgttctgttcaggaaaatttcccctgtgcccatgtattagaggctcttctccactttttcttctattagtttcagtgtacttagttttatgtggcggtccttgatccacttggacttgagctttatacaaggagataagaatggatcaattcgcattcttctacatgctgacctccagttgaaccagcaccatttgctgaaaatgcttttttccactggatggttttagcttctttgtcaaagatcaagtgaccataggtgtatgggttaatttctgggtcttcaattctattccattgatctcctgtctgtctctgtaccaataccatacagtttttttttttttaatcactattgctctgtagtattgcttgaggtcaaggacagtgatttaaccccccctcccagaagttcttttattgttgagaatagttttcactatcctgttttttttttttttttgttttttgtgtgattccaaatgaatttgcaaatggctctttctaactctgtgaagaattaagttggaattttgatgggggttgcattgaatctgttgactgtcttcagcaaataacctcatatttgtaataggttatgttgtattatttcccaagagcaatgttcgttggctctctttgcttccttagaccctattcttaacagcaccagacattaaacttttatctgttattgtacttacatgcaaaccactgtttcctctgaagtacctatacttatacttttagtctctttgacctttgactctttctgtgtctttttgttttagacaagtctgttgtaagcagacttactatacctcagtctcactacctattatgcccaacttgagcaggacctgtaacatgacatctttttgtagcactctcaatggcatgaaaacttcatgacgcttcagatgctgtaaggcaaaaggtgctccctggctttggctccctctgtcccattcctgtctccctttgactccctagaattttatactaacagattaatacatcaaaacaaaatttaatttacaccatatttagcaagaaattcaattaggacacctaatccagaatattcccagaagccattataatctatatggtaatttgtatatgtttaacatttttttatatactaaactccttgggatagaaattggttcacagtgttgaccctgtaagttcttatttctcataaacaacattgaatcagtaaaaaaccaaccaaacaaacaaaaacacaaaaccaagatactcaaacaaaaaacaggtcatttatccaggatttacgttagatgatttcctaataattataaagataaatgattagaaagtctgagaaatgtgaacttaattaaaatacagaaatttctttttaaaaaatatatacttagatatttgtttatttacttatttatcttttttgtttgcttgttttcatggttttttaagatctatttatttattatatgtaagtacactgtagctgtcttcagacactccagaagagggagtcagatctcgttaaggatggttgtgagccaccatgtcgttgctgggatttgaactcaggagtagtcggtgctcttaactgctgagccatctctctagccccagaaaataatttctatttatcacttactggatcaagtttcactgataccaactcagcacccaaacttggaattcttcaatatgtcaatttaaataatcagtttggagcaactttctcagccacataggttggaagtgatagaggcagagtttgacctctgtgaacttacctctgccaggcatcttcctcttcaattttgtgctatcctttgtgtccccactaatacaactgtatgtagccaaactgaatgccatctatataatcacccgtaatgaaaatgtatactcttttggtagcctatttcatgtgggagaggcattatctctctgcacagcataactccatatacacttttttgatgtgtaaatatatacattttagaaagcttcttccctggttatttcgaatagagcatcagtgaacatgaatgggtaagtatctctgtagtaggatagtagggtctttcaggaatatgtccaggagtcatatggtgagtcaaatgctagttctagctctgctttttgaggaacctccatcctgatttccatggtggccacaccagtttacattcccaccagcaatcaaaaagttgtcctctttccccatgagctttgttgttgttttcttgatcttgattttagccatcctgactaggttaaggtgccaggttatctatctctgagttgatggtcattggtgtcccatagaccccccccccaaggcaatacaaactattgctattgcttttgactgtcctctagaaattgagggtaagaccctattgctaaagatatcagatacttgagaaatcaagctggtactaacctggaagtatcattactactgactatccttgatagatttggaaggtgctgggcacactgcttaagaagtaagataaaatcatcagtgttaccaagctatgaactctgagttacaataacaactggactagtacaatagtggcaataaagttttgagagtaaaaactgctttctgattatattgaagaatagttccacaagattgtggagaacctttttggggtacctcttggcaggaatatgacattgtccaaagaaaaggaaatgggcttcaggcaaaaatctgacattggccatggcaaggaagtaagctcaggtaggaatctgacataacaaacattaaaaggccctgctcatataacacaaacaagctgtgcatgtcttgaagacggggaaggaaggcattcttgtcagaacaacctaagacaggctcagccacgtttattaaattaaaaggggggagatgtggagagcctttttggggtgccacttggcaggaatatgaccttgtccaaggacaaggaaatgggcttcaggcaggaatctgacattggccataacaaggaagtaaactcaggttagaatcgacattggagtgtgggaagccacatgtgccattgcagagtggtgctggctactgctggccaccacgcataagtttggacaaacaaccaatgtgtacatatgcagtaaagctttttgccaagtcactgcctggcccgggcatgttaatgaggtactgagatataaccaatcagatgtgagacatgcaaatgaggtatgttaatgaggttctgtgaggtactgagagagagtagccatcagatgaggaacatgcaaatgaggcatagtgcataaccaatcagggtgtgagacactgggcttggggtctcttcgcctctgcaatcaagctcctgttgcagtattgttcttgctggtcgagtccggcaagattggagcatgacaaagaagtaaattcagggagggacctgacattggccaagaataaggaattaacaatctggttttagggtagaacaaagaagtaggctctgatatcttgatcgtccttagacacagctagtcatggggctttgtgtttattgtcttgcttgttccttgactattgtccttttagtttcttattgtactgctagcccttaacacttgcatgtaattaaaatggtataaaaagcaaattgggaaaattaaatttgccttcaatctcagaattgactgggatcatgctacaatgttgtctgtcttttttctttttaatcctcactcctgtgctggagaacctgttgactgactgagcgggcgtggtcagtactactacttattcatgacaactgtaataagttattgtgagttagagtcaatccagtctgctgtagaattattgcttctatcttagagtgccaacttctctgtttccagctttcaccttcctggcctttagtaatcactactattctttaggttgtcttttttttttttttttttgcacacacatattgagtgtatttcttataatcatcacctgtcaataaaaaagcttatggccaatgaactgaggcaggaaataggaagtgggacgtccagcagggatagagagaattctgggaaatattcagagttgtgagagattcaaaagctatgtaattcagtaggtagctgaaaccaggttaaaataaaagggataacaagtaaaagcaagtcagagaacaacctgaaggttatggcctcagcaattattaatacataattagtctcagagtagtcattccgggagcagggcccaggaggaaaaaacctggatttattttttacacaaacacatataagaaaagaattttttgtcattctaacttaaattagtataatgtctttaagtactattctattttgctgtatgtggtagaatatttctttttatgactgagtggcagtcattgtagatatacatcccactgttgttggatattttgtttgattccttatcgaacagtgctgtaaaaaacaaaaaaacatgagtgttcagatatctctttgaaagcagacagaatttctcttgaatatacatccagaaacagtacggccagatcctagcacagatctatttatagtattgagtactaatttatgatcccattttttgtttctttataaacagatggtagttatccagggtgctaatatttttcagttcaagctattagtatttttttctgttatataatttaaatattaagtagtatgcagtgatgactctgaagatggtaagatgaatgtattagatgacatcactctgataataaacagtaatatcacaataacctaaagtgttagaaccttgagaaagaggagaatctgaacaagagcaaaacctctgtgttttcctcaaagaggctttacaaaatcaaatataaacagtatttgacggaacaaaattcactaatatgcatttaaggctacatgggattctgaaatatgtttgttttatttactgtttgcttgtattcctgaatagcaaagatgagatgcaagagattggcaaagaaataggtaaaaaaaaaaaaaaaatctcctgattctcccaaatttatgaatgcaaattgtgaaacactttagcacacagtctcagagctgaaaatttaaaaacaaaacccaaggtaatgtgattcacacttaaagtatgatagactgtagcttgctggtgaggtgaggtgatttatcatgttgtggagttttaaataactgctactaagtgctctggcaccaaaaataacaccaaaagaacaaaacacgacctaatagggaagagtttcttagctaagcaataccaatgtgaaacaggctcatttgaacaaaatccatgaatacaagagttcttgtggttcattttctacttttggttcggaattgctccgatatggggactagcctaaggactcagcctatctttcacacagtgaaaaggcagtagcagcgttgagatatgatgtcatgaacatttgtactgagcacaaacagaccaactggagacattcattataaagacattcagtggaaaggtttcaatgtgggcagtaaattagaaatataaacattatactgtacttatttaatatattgtgtaacgattaaaaatgaggacatagccctaaaaaaatgaatgaaaaaaaaaaaacctgccccactgatcttgtattcttgataaacaataagccttttgacagctaagagtgctctgaacataatggcaggaggaatctttatagaacccactgtgtttgttgctattttaggtgtgtggtcagaggattctctgtaggggtgacatttgagttaagaaaatgacaggaagaagtaagcaaacaaaacacaaagctgtggaacaattttgcaaggagggttttgttttgtttaaaaaaaaaataagtaaaggtacggttaacgatgctgaataaatcgcgccaacttctaggagccttatgaaagcttcggggccattaaagggcgagaatgttaatgaggtcccagagttaggtaaggagtttagtggttactccaagtacagttggttttcacagggcgttgtaaaacaggagtggaacgtagtggatgtaatacaatcgacctcttaaaaacactgcacttcgggtttacttctttgaacgtagaatttccttatcgatcgaacatcatccctttctcctctttcgcccaggatatttgtacaggtttagattttgtttgcacgggttgacagcctgggaggaggagtgtgtgacagttggctcgcgcagtgaggccaaggcctagccaagtcgccgcaggggacgaagcagtgagtggggaggaaagaggagctgtggctgcggttgggagggatggggagcctcttcgcggggtgttgacttccggcagttggagagacaggagctagcaggagctactgcggtctctacgtgtctcgtaggctgccggggaccgccccgatttggcaccggaaacaatggggcccgaggcaaaggcgcgagtactaggggaagggggaacttggctccctccggtctagccccgcggaatcaggccgtgtaccctgaaggctgggagcagccaactgctggtgtcgagtaaggacaggactaggcaggcgggcctctctgcacacaacctctgcgcgcacggtccgttctcctacaccccgctccgggttttgagatctgctcgcagttctaagcccagccctaagcaaagggcaccgatcgactcccgggcccctcccttcctctggcctccggctttgctgcagcagcagctgctgcagggcgttcttctaaaggagagaagtcgggccgaccaccgccgcagggcttgctccggcggttaagaagagcgccgccccgggctagcccagcgtagaggccgacacaccctgggccttgtcttgctttcagaacgcgaagggcgacaacccctctggcgacagcgtcaccggccgcatttccgggctcagtactggggggtggccgcacccgaaacacggccggatgcagtagtaggtgtaccagttgtatgaaccggggtactacagctctgcggcacagacagcgcggcggctagaagtgagctccgggggtggggctctaagccccgccccagcactgcgctcctccccgccgcccctgggcggagtgggcctagggttgagcgatgcttagcgtccacgcctcagtgggtcttttgcagcagttgcgaaaacccggaacgaaggtgttgttgccgtgcggcggagcggcgccgcccctcgccgcacctccccggcagccctcggaggcctttgctgggcatgctcagtcgtcaggaccgcttcggctctcggagtaggaagcttggggcgctgggctggtaaggacccgcggcggggcgaagatggagtcctttaccaatggtgagtggctagcccgagtcgcggattcccgggctctcagggtccagagggtcagatgtggcaagggggtcaggctgcaggcatccctgccaagggtttcccaggcgggccggggggcggcagaggggccagggtcggctggggcaggcgtgaaggtcagccctctcccgggggccagccccgaacctccaggtgaggtagtcggcaaagtttgggatgcttgcgcggtggagggggcggcggcaaagttggcaacggcgttggtcctgggggaagcggccgcggccaggagaagctgcggccccggcgaaagcctactcgtgcggggagcctggagctgtccgcccgtccttcaccgagctgtccgcatgcctttccgtaacagggcggggtggggccgcggctggcagcgtgatttagtgcactgcagggaaggaaacttaccgggggctggctagtactgctcggtgtggcgaagatgccgccccgcattgccacccgtctgcctaccgctgctccgcaggtcgaccaaacttctttttaccagctagtgatgtttgatcttctagttagagatccattgaatatcaatggcccttgttgggcttatatcataaggtggcatgggtgtgtgtgtgtgaaagtcaaagcagtctgtgtccagaaaatagccacggccctttacttcatggcttttgtctgggcttgtagtgcttgagtctcaatatagaggtgagatgatgtctcaccattttatggtgtttaaatatatggattccactttaggatggaaagtaggaaaactgctagtaaagggtagggcttaatgagattagaggatccactttctacttggcatgtgtttccagtgtggttggttacttcaggtaggtagaaagtcagattaatgggagagaagcatattattgttgggaggggggtcgcatgccacttaaggaactgggaagggggaggggacacccactctatccactctaatgcctaggctggactttgttgtgttctttaacattgtttaccacatcgctggagctgtgacctactcattatgttctccttttccctaattcgggatgctttattctcctgccatctttctgtctgcagtgtttaattaggcttagtaatgacagctttaactccaaatttctttctcatatgtgttctatttgtaattaccaagtttctaagaatagtctggtaaacttactcagagaattaaggaagatttgaactgaaaggcaccatagagaccatctaggatttgagtgtaaaatgtgcttaaaagaggtataaaattttccaagacgttttcttccttctaggcagaattattggagcctccttgttttaaatatgtaggtaagatttttaattatgaaatcttacccaattgaaaacaagaatgagtcatttatttagtcaggtttttccctggttgatttgttgaacttcccccctacataattaaagtacattttcacaccataaagttaaaatcttttctcctcccatagaatatcctcctttagatatatttacaaactgtctcatttgggaagaccatggagaaatcctagagaaaagaggcaaaaggtcaacttttctagttcttttctgtctaccagtttttcacagttggtgttgaaggctgattggcaatgtttcatttcagttaatgctgtcctttaagaaggaaagcaggaactacatataactctgatactgctaatttaaggtgctttgaagactttaaggcggaataggtatttaaaacttttagaagtttgctgtagaattttctcgtgttcgaatactatatagtggaaattgtacttatttttgtcatcttacaatctatgattgaaggatttatcaagcttgtttgtttgtttgtttgtttgtttttcaggacagggtttctctgtatagccctggctgtcctggaactcgcctttgtagaccaggctggcctcaaactcagaaatccacctgcctccgcctcccgagtgctgggattagaggcgtgcgccagcacgggccggcctggatttattaagcttaatattggcttttgtaattgatcctcctttagtaaatctttctcatttacatgctcttgaatgtccctgcataaagaggtgtgtgtgtgtatagatgtataataaagtttcagtagctctgagcccttggctttcttaaaatactgtcagcagttcattaactgactcacaagttcataaagtcgaggaatttagtcttgtcattccaaccttcagaactcagtgatttcagtagcattttctatgctttcactatttgctgtgcaatgagttgctatggtggctcattttcttgagccctgttctctgcctgaaataataggttcatgtattaataaatatcttgtgttcatcagttcagctaataactgttataacccatttaaaattaatgtttctagaaaaggcctataaagatggactttagtgccagaaattcctatttggctcaggaaatagtttttgccttgaccttgagagggactgttaccacactgaaagctggacatttcgtctggctctagctctctggtgacattttatgggcaaaggaatgtgttgactcgtacgtaagattggtttgacagtagctgccttgtcctattaaggcaggtagagatgaaacttttaggagtagtggtgacctatttatttattagcaccatagaaagttcatggaaactatctaggttttctaagaaatactacattaagacagctatttatttgatgtccatctgcctttattctcatttgcttgagatctctcagaatagctttaatttggattaagagatgctaaaattcaaggcttaatggaaaaatctggttgaggaggtccagggtcaggcctagaaatatctgattgcattttgagaatagtagaaatattcatttaaagagggcttggagaaagttttcaggtaaacaaatagagactttacaaacataggaataaattaattttctgttattatttagtatatattttgctaacagatactagtttttggtgtgattacaggtaaatctagtggttggaaaatcattgctgtattgaagtgccaaaaccaaaagcctagtagagattgtcactttttatatgaattatatagcctccacacaaatcattttactactgtacagtggtatataatcagacgaggcagacctcctgtctttcagagttgtgtatgtttgtttttagattaatatccagttaaaagtattttccaacttttaaaatggaataccttgacaacaaattatctacttatggattgtaaagcagtataaagttatgccagttttatcctataaataacagttgtttgataaatgtgtgtatctctcaaaaaaacttacatatagtatcatctcagaaacaggagcttaccatgtactgtttatatgttcatttacatatatacgtttctttttgttctatagtgaattacttcattggaagaaaactttttaaagtttttctgaaatggaatatgagttcaattgtgtgtgtgtgtgtgtttgtgtttgtttctgctcctgccttatcttttaaattacagttggggaaatctgatatagaaattaagagttagccaggagttagggttagccatatcttatgccttaattccagcactcagggagacagaggcagatgatctcagctggcctggtttccttagcaagttccaggcaggccaggcctaagaagtgtgagaccttatctcaaaaagcaacaataacaaaacaagaacaacaaaaaatgaaatcaagggctaactagcatcataaaaaaaaaacaaaaccaaaccaaaccaaaccaaaccaaaacaaaacaaaacaaaaaaacgggtaaaaagggtagctataaagtattaaagtttaaaccaggaagcagtgttagcaaatttttttttatcttgagacagaataaaagacagcatattttagaaactattatagcaataattgtcgtttgtctgtctgtgatctttgagagctcaatctgaaaggtagagaactcaaaannnnnnnnnnnnnnnnnnnnattgcctttccttcagtctctgcaccacaatttgtccccatatttgttcccttgagtatttttttccattttttattaggtatttagctcatttacatttccaatgctataccaaaagtcccccataaaccccccccactcccctacccacccactccccctttttggccctggcattcccctgtattggggcacataaagtttgcacgtccaatgggcctctctttgcagtgatggccgactaggccatcttttgatacatatgcagctaaagacaagagctcccgggtactggttagttcatattgttgttccacctatagggttgcagttccctttagctccttgggtaatttctctagctcctccattaggggccgtgtgacccatccaatagctgactgtgatcatccacttctgtgtttgctaggccccggcatagtctcacaagagacagctacatctgggtcctttcagcgaaatcttgctagtgtatgcaatggtgtcagcatttggaagctgattatgggatggatccctgcatatggcaatcactagatggtccatcctttcatcacacacagcttcttttaaatgctcactttagaggtaggttttctgctggaagaattttacaagcatattatcaaatagtagtagcccataagaaatgtaattttgcctaagataatattctaattgtgaaagaaatgtgcaaaattgtttttctaatctgttcatatagcatttgtcagtaacaaagatacattgactaatgtcacattatacctttattagaaaacagcattttttccagaacttagccaagaccactgtggacttgggttgtgtgtggtgcagctgtgttctgtcagctacttggtgtctggaaaactgtatggggttggagttgaactactacaaagctttttgtaaggctctctccctgacccccttcccctttagagataccctttctgttaatgaaaaaccaggaagaggaacgaaataaaggaaattatggagcccccatggtgtcataactctttttatatctagtgacatttgtagagaatgttacttgttgctttagtagaaaacattgaaaataacaacagaaagtaagaggtgttctgtccaagggagggccatcatcaaggaatgaaggtgctggcaggagatagaaagaatttgctaggaattgaactgactgccttcttttattttctagtcaggagaatccagtcactttaaggtaggactattaactgtctaagatattctacatatgaagaaaacaagatagtcaagagtaccgtccctttcccactgtgatagcaattttttcctgttcgtattgcttgatttttgtttcactttggtgttggtgcttatggttgaacaaagagctgattgattttaatttcaaccttagcatctaaactaggaaccaagccgtttaccaaataaaattgaggctgccaatgaagttttcaaaaacaatggagtgttaagtttaattgtaagagattctttgaagttgttttccttctcatatgtactgcttagtgaaaggcctcctgggcattccacatatttctagaatggagtcactgaaacaaaatttgactcagttatctgtgtctttggggaggggtggagtccaaaccttttttaaagctacagggttctactggaggaggctgattgatggggggaatggtggagttagagaaggcttcctgatgtttctttggggagagcttcttcgggtgaggggataggacagcagggatgcagtgagaagtcacctccttgggttgttgatttccattttcttatagcaaatgatggaagtgtttcccaggcaactgctttaaatgtcataaattcctgatagcagaggaggctttggatattagtcttgtgctcaagtgtgtgtgtgtgtgtgtgtgtgtggtgtgtgtgatgtgtgtggtgtgtgtgtgggtgtgtgtgtgtgtgtatgtgggggtgtgggtgtgtgtgtgtgtgtgggtgtgggtgtgtgtggtgtgtgtgtgggtgtgtgtgtgtgtatgtgggtgtgtgtggtgtgtgtgtgtgtgtgtgtgtgtgtgtgtgtgtgtgtgtattattgcctggtctcagcctctgccttaattcccttgagattgtctctcttcttgaacctggagctcagtatgttttatggctaggctggcagccaacaaatcctggggactctcctgccttccctcctgcagggttagaggcacatgtgtccatgcccagggttttcagagggaggagtggttctgatgagtccaactcaggtcctcatgcttgtacagcaaatggttttactcactgagtaatccccactactgggagcttgatatttctttaagctgaaacttactttggaagattttaaaacaactatcagaacattcatatccacaaagtattatagcatcctaagaataagagaaaacttgcgtagagattagtagtagaggctgggaatatagctaagtgcctaagagactattctttaagtaggtattggtacagtgatatgaagactgtataatgcttatctagtttcggttaccaaaaatatgttccatggtttgcttagggcaagttcctgtggcccttgagacttggtaggcagaactggtctgtttagatttaccaagatcctatatcgaagcttgggccggtctatctatacccttagtagcagtaattttctgctctttgcactgggtgctgtgccagcccttgggatccttggtagtgtctcttcagtgtttagagtgggtggctggatggggaaggccgtttaggttgagcgtacaggactgggtgcttctcagtggggtgagaagtagtccattgagtgtacaggactgggtgcttctcagtggggtgagaagtagtccattgtattatgcagcagctttacttggacggtgagtatggagcggtttgatgcctttttcagttggaggtcgtgtgcagaaaaatcactgagtctaaataaaagagacttgaagtagaataagcaaaagtttattaggacgtgattggcttggctccactctagttgttcattgcagatgaacgcacatttatgtaattcccaattttggaaatattaaaatactagatacaaaagtattaaacgcagaagaattcaacatctgtttagtttatataattgaatgacagtgattgaatagtttctttaaaatgtggttacagtcttagccttttgaataattacaatttgtttggacggattaaataagaaaactagtacacaaatgattgtaaattggtgagaaaattactgctttagtggtttaagattgtcatagacttgtattttattagtctaatgtctcagatgaaaaatatttcaaagaattatcaaaaaaagcatttcaacaagttatctgcagaataattacttggtaaaatctattgaatattgggcctggcaaatttattcaccaactgaaatattttctgacgtgagttttttgtttatattgaaatggtttcgttgcccttacagaccccattattgatattcgtaagtgcattttcctgtgcctcagcctgaattccactttcctgggctggtatctcagaaagcagaatgctgatatttcagagcatatgcagtccattgtgaaatgacactaaagctagtcctttattccatcttcagacttaaagtttctaattttatgtggggtaaaagaggaaatgtgaattatataaacttaaagtataattatgatatcttaaaaattataatacaagtattaaaaatttggttataagctacaaaattttggaaaattattatcatgaaatcaattgtcctcccccctacttccataaaagcatttttttcctttgatttcttccacgtttttcctttgtttcattttatttatttttttatttattcactttacatcctgctcactgccttcctcctggtcacctcctccatcaggccttccctccatgcctcccaccccttttcttctgagcagatgggggccctcttcagtatcctcccactctggtacatcaagtttctgtgggactaggtgcatcttctcccactgaggccagacaaggcagcccagctataagaacataacccacggacagacaacagctcttgggatagttcctactccagttgttcaggacccacatgaagaccacatgtgtgtgtgtggggggggggtggctaggtccagcacttaaggccattttgttctatgatgtgaaattaatattcatgaatgtgatcacagtttcaaaaggagacaatgaagaaacaagataatgagaaaaacaaaaattaaaaaaataagattttggggtggagagatggctcatcggttaagagcagcagttaagaactcagaggtcctgagttcaattcccagcagccacatggtggttcacaggcatctgtaatggaatctgatgccctcttctggagtgtctgaagacagctacagtgtactcacaaaataaattaaaaaactaaattaagattttgagtaatattagataaaagtcaactgaagaccagtaaatcagttttcaagaaaaccagacaacttttgttatttaactttgtgtccaataattccatcaaacttaaagttaatcctttgttttaaaaataccaggaattgctcaggaaggatcctttctaatataaattttaaaatcaatactttgtatttattctttgagaatctcatttatgtgtacaatgtgttttgatcaaatcccctcctacattctaacttcttcagtaccccctcccccatcttcttccacctcatttccataacttgctgactccagttagtactgtccttatatttatgggcatgacccttcactggaatataggcaacctatatggaacagtatagctcctaaactggacatggggccttgtgagcccctccccaatccatgctagaattttgactgtcttgacatgtagccagatctgtgtgagtagccatgccatgtcctgaaggtatgattttacagcatcattctcaaggccttctgttcttcctgcctcttcctctgtgatattcgctgagcctttcctggtgggtgagaggtagatgttccatttagaactgagcacagagctaaattttgatacaaaatcttgggtgctgtttaagtttcttaacattcttaccactgtatgttaattatacaaaataacggaattcattatgattttatatatgtatatatatggtacttcgatcatatttactgtctttttacacacaaatactcacgtttgctggtcttagtcaatagacaatattctataactttttggggggtttgcttgtgtctgttttctaaatattttaaaaacataccctcacaaataaaacataaaacttgtgtttttaccgtattttaacacactccaagctttgttcttaaatagagagtctaggtagaattgtggcctttggagagtttacattgtggaaagagtagctttttaacaggctctgaacccaggctaatcactcttcttgagcactgtcgagttcagaattataggtcccttctcgaaactcaatcttctcccaagtgcatttggttttgtactttttttcgttattcattgtggaactctgtctatgaattagctttaatttgtaagatgcttgcacaatgtagttatggtgagtaattcacactgcttcattcaaattctggcctttttctccctgtgtaagtactttttgacttaaagatgttacaggatgttgttttatagtttaaaaactaagttttactgaaagaaaaaaggcacatgatcatctcattagacaatgaaaaagcctttgacaaaaaaaaacacccaataccccttcacaataaaagtcttggagagatcagagatactagggatgtaactaagcataataaagacaatttagagcaggcctatagctgacatcagattaaatagagaaacttaaagcagttccactaaaatcaggaataagacaaggctatgcccctcttattgattcaatatagtatttgaagttctaactagaagaataaaacaaccaaaagcgatcaaggggatgcagattggacaggaagaattcataatatcattatttgcagatgatatgatagtatacttaagtgacccccaaaattctaccaggaaacacttagagctgacaaactcccttcatcgaagtggttagatataagattcactaaaaaaaaaaaaaaaagaaaaaaaaaaaaggactctcctatatacaaacgacaaacaggctgaaaaggaaccagggaaacaacaccttttacaatagccacaataatataaaatatcttagggtaactctaacctagcaagtaaaagacctgtatgataagacttaaagtctttgaagaagaaaatgagagaagatatcagaagatagaaagatttttccatactcatggattaacatagtaaaaatggccatcctagcaaaagcagtctatgaattcagtgcattccccatcaaaattccaacacaatttttttagataccttgaaagaacaatatgcaatttcatttggaaaaacaaaaaacccaggatagctaaaataatcttgtacaataaaagaaattctggaggtatcacaattccttatctcaagctgtttttattagcatagaaacacacatattgatcaacagaattgaagattgacacctatggacacccgatttttgataaagaaagacaaattaatatacaatagaaaaaagggaagcatcttcaaccagaaggtttagctggatgttgatatttacaagagtgcaaagaaaattggcaatcgatcagtctcaagacccagctatactcctggacatcttcctaaaggacgcctagcctatcacaaggacacctgctcaactgtgttcatagcagctatattcataatagtcagaagctggaaacaacctagttgtccctcaactgacgaatggataaaacaaaatgtgatttgtttacacagtggagtattactcagctgttaacatcatgacatcatgacatttgcaggcaaatggatggaactagaaaattcatcccgagtgaggtaacccaaacccagaaaaaaaatacatggtatatactcacttataagtagatttgaactgtaaagactttaagtcttatcatacaggtcttttacttgataggttagagttaccctaagatattttaaagaaaatcatactacagtccacagacccagagaggccaagcaacaaggagggcttaaggggtgcatggaaaggagctcctagggaaggggaaatgaaagagatttctgcaggtgaagtggggctgagtgggtttgggaacaggaaggatcagatggggaaggcagggagggagagcgatggttgaggagacagcagtttgattgtattctggctgtcctagttactgttgtgttgctgcaaagagataccttgaccagaggaattcttataaaagaagctaattggagcttccttacagtgttagagggttagtccgggttcatcactgtgctagaaccatttgagagatttacaatcctccttcacaggcagcagacagagaaagagactaggcccacccacggtgacacacctactctagcatggacacaccttccagtctttgccaaacagttcagctccctggtgagttagccattcagataaatgaacctattggaagccattctcatttaaatcaccttaccagccataatgagattttaaaaaaatatttggaatgaattttatttcacttgtttcatgttttactgaaggatctaggcagtgcaggaagtctctttctgttttatatattaattattaattaatttgtaaaaatttctgggaattgtggcctaaaagtagagaaacctttcatccacttatctacttctggtgtaggtaggtttttgattcccttaagtgaatgtaatgtgaaattactttattagtatcattattcagtagacatggaacctgctttaatctaagattagatattaaatatagtttatattatagctaaggttaaaatggaccaaaagaatggtctttatatgacaatatgcagtaaacatgctttctcagctggcattgaggcctgtgtcttccaggcattagagatgcaaacatttgtaatatcaaggttagagtagctatctcctgtttcttcgtgggaagctcagtaaactggttttactgactaatttgtttgtgtttataactgacatgttacttttgctgaatgaatgtaacttagcaggagctttggctctgagaaaacattatgaattttgcaatttacctcactacttccaccctaccatgagtttgtatccatctttctgtcttgtattcttttttttttcttcacaaagataatattttgaactttgaggaattcaaaggctagtgattttgaccaggaactaagatgaaggatataagttattctctaagtatttggtggctgtgcaggtagattacaggggaacataattggagtatagaaactaaaggtaaagagatgtggagagccgtgccgcgagcaattgctgaggagagccatgtgtgcctcgagcaatcgccattataagatggtgctggcctccgctgtgcctaactagtaaacaagccttgtacgcaggcgcgagagtgaactcacgcctagtcactgcccatctcgcggtgtagtaatggggtgatgggcagcaatgaatcaggagctgtcaagccacatcaggtgctgaaacgtcacactgccggctatataagcagcgccattttcccggttcggggtcttcctgagaagtaagcaataaagcttggccgcagaagattccggttgtcctgagtgtgttcttgccggcgggaacaaaagctcgggataaagagattatacttttccacaggaaaaagcataaatggtgggttataaaagcagagacgctatatgcttaggatatatgacgctatatgctgtgttttcattattctaatcgtcatctaacagtgtttcaaacatactttatatttacaaacagagtgttactttaggttaagattactttaaaaaaaaaaaaaacctccaaaataaatatttgtattcttttaatttggaagtttgtctttcctcttccttttcctagaaacttctctatagcaaaggatctgttagttagtttgttggaacaatgtctcactggttagcactagctggcttagcttgatacatagaccaagttagcctcaagcttgcagcagtcctcttttctatgtgctagaattacatgtgtgagccaccacactctcctaaaaacattcttatttatttatttnnnnnnnnnnnnnnnnnnnntcatgctgcgggctatataagcagcaccattttcccggttccgggtcttcctgagaagtaagcaataaagcttggccgcagaagattccggttgtcctgagtgtgttcttgccggcggggacaaaagctcgggataaagagattatacttttccacaggaaaaagcataaatggtgggttataaaagcagagacactatatgcttaggattttatttgctaaatgtttataaatatttgtttggttcagtataaaaatgtatatttttattcatacagcatataaataaacacagaatttttagttaagcatgaaacatatctgtaatcctagcacttcagtggctgaggccaggaggatctccagtttgaagatcctgggatcttgtctcaaagaaacaaacagatgcacaattctgttttcattattctaatcatcatctaacagtgtttcaaacatactttatatttacaaacagagtgttactttaggttaagattactttaaaaaaaaagcctccaaaataaatatttgtattcttttaatttggaagtttgtctttcctcttccttttcctagaaacttctctatagcaaaggatctgttagttagtttgttggaacaatgtctcactggttagcactagctggcttagcttgatacatagaccaagttagcctcaagcttgcagcagtcctcttttctatgtgctagaattacatgtgtgagtcaccacactctcctaaaaacattcttatttatttatttatttatttatttattggttttttgagacagggtttctctgtgtagccctggtcactttgtagaccaggctggcctcgaactcagaaatccgctggcctcgaactcagaaatccgcctgcctctgcctcctgagtgctgggattaaaggcgtgcgctaccacgcccagctttcttaaaacattcttaataattcacttagcttccctttcagtgaaatgcatttattgatgcatgaaaaaaagaagtaagaatgaaaggaaaggacatgattgctcctagatatagtgaaggagaaagtttattatagagatgtgggagagcattgccagggccagacacatctgggaaagttcagagtagtcatgacactgaaccttgtggggagagcgggagggagagaggagaaccaagtatggcagccaggagaccaaaggtacaaaaagggacaggtaaccaaaatgtctgaattatatagggaagagcctctgggggaagagcagctgggttggaaagtatagggtagaaggtgtggtttgtcagccataccgtgtgacatgtagagactgagagatgctaggagaacctgttgaccaggtctgctttgctgtgttaaataggcatctcagcagcttgtcctgggtttgaaacttaacaattgatcttttgctgaacttcagattctgtgatttatagagaaaagacagtgtttcataaaaccctgtctcggtgtttggagagggtgtgatgtggggttggagagtctctttatgtgaaaaactttcaaagcttaagatggaaagtgaaccagtattttcctttttcatttctcatcttgtatgctcatttcatggctagagaactgttgtccatttaaggcctaagcagtgtggtgagtcagtttcctttcctgtgctactgtggggccttctgggggaattggacagagccacagaggcagtccccagccaattagattcggttggttttttttttttttttttttgagacagggtttctctgtgtaaccctagctgtcctggaactcactctgtagaccaggctggcctcgaactcagaaatccacctgcttctgcctcccaagtgctgggattaaaggcgtgcgccaccagtccggctttttttttcttcagcttttaaaacgaaactttctgatattctctagagctgataaaaaggaatgagcgcgtctcacacagcttttgatatggctttatgaaaaggtgtaagaaagtgaagctatgttgtagctgttgatgacaaggccatgaagaggcaaggatgtcagtgatgcaatgaaaagacaagtggaattcattagttgattttgagccaaggtatgaaactatgaattttatccctgactatccaagaagaaaagttagagggcatttttatcctgatgttaatctaatgataaaaatcaatggacactttgagaacacagccaaaacagtaccttatgaaccacaaaaatagtttgtataaattgttgacatgtatattgtgctatgtgatactgcggaaacccattcaccactggattttcctggcgtttctatacagtcctgcctcccttcctcattgtgcttatggagagagtggttatactgaagtagagtagaggcagtataattagtctctttcccctataatgaaatggcacacagtgagtgacttaaacaacagattaatttcttatagttctaaagcttatccaagatcaccaaggcaccagcatagcatagttatatcatagttatatcatagcatagcacagttatatcatagtgagggtttcctcttttgtttgcagataccatcttcttgctgtgttctcgagtggcctgctttttgcagatgttgaataagcaaggaagcttcagtggttttccttcgtataagtccaccctttctgtcaggttgagaacctgttctcttggcctcattaaaccttaattagtagagcacactggtgcacacctgtgatctcagcatttggcatgaggatctctgcaagcatgaggtcagcctgctctaagtagtcagtctcaggccagccagggctaaataagtctctgtttaaacagaaaagagaaaacaaaaaaacttcaggcaatacaattcagttcaaaggagccttcacttgcgctctctctctctctctctctctctctctctctctctctcacacacacacacacacacacacataagaataagggtgctattttgattcattgtcatccttgtttctgtttatgtctatagggtttcaacatgctgctcctttccccgcactcagaattccaactctctgtagtgcacaaattataatttcacttcttagctcctttctggttttttttttttttcccttgaactatcttagtaggattttagtgagttaaagatctccatggctaagtttatttttcttctctacatattctaatatggaaacaggagcggagaattgtagcctttttccacctggcctctttgttcccagaaataatgactctgagacttaattatatatgaataaatgcttaggccataagctttgacttgttccccagctagctcctaacttaattacccatttattctagtctatgcctttacacatggttggtttcctctcttgcggtttttgctactgtctcctccagagtttggagtaaatctcttgcacttgactcttttccaggacccccccccccccaacccttgctggaacttcccacctcctatttcctgcttcagctcattagccataggctttttttttttttttggacaggtgatgcttccatatagctcacaagagattctctctccacagattctctctctcctcacgcataatgttctagacctttaagaggaccagagttgaatctcttttttctgtgttttcagacaccacaagttttgccctgagcttaaccaggtcagctaggattatcctgtgagggtaggcatcacctagtatagatagctaatctattgttaccgcgtcaagattataattcctgcttgactggctgtgggaaaaggaggatattcctgtgagctatgagttaatttcatctaaatacctgactggtgttttattagtttaaaatgctggtcaggtataaacagaaacagtttttatcatagaaaggtagacatttttgtctaccttcttttagaacaaatttagtaaacgtttaccatgtaaaacttgcttaagtccgaattactagtttctttctttatatcagcaatacttatgttccaccaaccatatgactatcctacacagactttcgaggccagctaaggttcatttgatcctatccagtaagagaagatggaaagggtattcactccatacattggcttcctgtctaaggatcataaaatatgggtaaatatgttgacacacatggtgtatggttattctgtttctaggactttcatgagtctttgctataggtctgaaagttttcactcacccaattgtatcttggtattttctttttaaactaaaataataaatttgtaagaaacaaattagacctttgtttgtataaactatagtttatactcttgactttttaaagcaaaagctaatgaataatacttctatggcataatttaaaaattttttaaatttggaatctatgactgtttctaaccagtattgatcagtttatacttttattgtcaaggttaagaaatgctcagtagataattaaaaatattcgtcaggcctctgacttgatagttggagacatactataaatatagaataaataatatttgtagcataaataatactttattctatatatctttattaatgtgtctgaagcatgcttgtcagtttaggatctctacagatgttaattgtgttatgatatgataaaatacttgttatttaatctctgaagtttagcttacattatcagtgactgttctaaagctgttttcctttttcttctttctaaaatttgatgatgtgctaaataagccgtgtttagatgtaagcatgtacattctgtagagtatacataggttctgctgacagaactagagtcctataaaagtagtgatgtgcctgtccactctcacccagccatatgaaatacttgatgttatgtttagatagttaaccctttattttgctggttttattgtaaatatcaaaaatacttagacacaggttttgtatggtttctatgtggaaatgaactgaaggtaattatgaaacaaagacctagaattcagcctgtgagtgggtagcaattgtttaagtgcagaagcctcagtggattgaccttcagtgtggttagaatcagagtaccccgttattgcaaacgcttgatttggggtattaaactttctaagcttacagtccaggcaattaacagccataaaatacaaaaaaacttacaatgcatcctttcttttatcccagtcctttgtcattcaaaatctactttttgtcattacaattttgtaattgttttgcaaaaactttaaaattgtttattgaaataaattaattttatataaatgtaaacaaacattaattcttttgggaccggctcccttcacaagaatttatttttaaaaaagtattgagtagcattgcactgtatagccatgccatgatttgtctgttagcagtttacaaacatctcaggaagtcttttgtacacatttgtcattacttcttttggataaatacctaggagtatctgttgttggtgattttttagggatatctgctatttatgttttaagaaatagtcacaagttttaaattagttgtgccactttactgtatatagcatatatacatatacatacatatatatatatatatatatgtacacacatatacatatacaattgttagtcttttaattctagacaatccagtgggtgtacatagtgactgtcttagtttgatttaatttgtatcttctcgagaacattgattttttttttctgatttttaaattttggctactagttcagcttcttttgagaatggctgtttaatcttttgacatttctttaaattagataattttgtgtcttactcaatgataagaattttttagatattctgggtacatgagataatatatgtatttgtacaagtatatgcaacaacagttttctgtatgtatgatgtatatgttcatgtggttgtatgtgtttgtgtgcatatataaataacagcagtaaatgttggcggtcttccttagtaacccttcccatcttattttttgtttcattgagattcttgaacttatatgtttttggtcataattgtagtcttgggctatttctccagataaattttactataatagtttggaactccaatcttcatgtattttagtcaatttggtattgtcctacaggtgttaatatttgtttatgtcttaatatttttttacttggcatgatgagctgtttctctggacaatggcaggccaaagccaaccatctaattgtttgtatcagttattttgccatacttgtaagataagtaatagagacagcaatggaaactaatagattttgctacattgatttttatctattctgcacatagataactcacagatttttctccaatatttttgtttcttcaataaaaaatgctggggccctgattcttttctctttgacaccattccattttgtttttgagactattaacactctgttgctgtgacaaataccacaagcgagagacatcttacagaaggaagggatctttagacttgcagttccagagaagagccactgtggctggtaggtggcaggcagcaagcagcagacatagaggttggaatagaagctgagggctcacatcttgaactgcttgaaaaggtggggagaaggggaagggagagagagagggacggagggttttattctttcattatcaattatatttttatggacttatataccacaaaaagaaaagaatatgatgtatttgaaactagaacagaaatagctttacattgtctttaatgactcatgccatgtagcctttttgcatgttagctttcctcgtaactcagtattaccctttcttgatcttctttctaaatataatactatacccagactcagttaccttatgtaacatcctttcacacgggccttaaatttgtcttctgaaactcctttcagtgtaagtaagctacatgacccctctagttctcagatactatagattcatgaacagacaacagaagcaaaactccattaaggttttaggccatagtctccggaaaggtagaacagaaggaaaaaaccttttggaagacattctcattcaaatcaccacagatactgttcaggtttgttttattattgttggtttttttttttcctcctccttcactttagattttcttttcaattaaaaattttctcctgaaaactttcattttcatttatctcaacccattttacgtttatttcagagcagtgttataacaacaggttatagaagctgaaagttctatctagtcttgaatgccttgtatatggaaaatgaacattttcttaatactttgtatgtaaagtacttttggcttgtgacttttaggttattaatgttatggagcgtagattcagtatctgtcttagtcctctggataatactttcttttaacagacattcaacttgctagggttcagctcttaaaacctgtttcattttggtggacagcagttccaggatcagttctgttctcctagcctttgcataataatgcttagtaaacacttcccggttctgatcctggcacctggtggtaaattaggttactagttaaagggagttaaagtttcaggtaggagttactgttgtgtcgggtgtggtggtataaacctacaatgcctgcatttaggaggcaagctaaaactgcatagtgaaacacttgtttccaaaaattaataaataaacacaaaatgaaattttttgtcatcgaatcttaaagagattatccaggattagccatttgagccctttgaagtcaaaatttgttaatatcatatagtatgacaatgattcagttggcctttgctggatgcaaacagtttctaggatatggaaaagataaggagatgagttcttccaagagctttcaggggaatcatagcactgttaacaactgatttggcctcagcgagtcccattgtggacttcttgcatctagaacttttgagaattaatttgtgttgttatagtaagcttttcaggtttgtggcaagtgttgtagcagttatgacttaaatgtaatattttccataggctcatatgtttgaacacttgatcccagttggtggaagatactgaaccttatggacatggtaatggatagtggttggctattaggagtgagactttgggattataggctggcccttgcttccaggtctgctctctgcatcctttctgccatgacataaacaatgtgctccagttcccactgttaacagctacacacccttgagtgataatcctttctgctcatgatcagctaccttctggacagtgtgccaaagacaatgctctgttgtttctgtcagctatgtttgtcacaatggtaagaatagcaactactgtaagcagaaatagacaccaatgcacactgctaccttgcagctttgatctgtatgtatgtatatatgcatgtatgtatgtatgtttatatgcatgtatgtatatatgtatatatctccctattgcccccctctctagttctctggtggttgttctgtaatttttgtaagttcatagaaaaatatctctaggttcatagaacaattcttttccctctggcattctctcaacactgtagcctgcagggctacttttcctggttctcgtacacagaaatatcaggctggctcaatgaaattttacctaattggcaccagcacactatttgtgactaaagcctgccctaagggtagaatggtcaaaggaaagagaacagtattaagatagacactaatcctcgtgtagactgctttgccaagtgttttctccattatctcctgtaaggcaaagtgaactgtggacagctatgaagtaatctgaggacaaagcatgtcgagaccttagtcgtttttgccagtgtcttagagttgtctctaacctaattcaagaatagttttaggacactccctttattgaactttgccagagatttccacccaacttgtcagaataaatctctttatgtttcataagctagttgaattacctaatagctatagcatgactgaaaatatcacttctgactttgggtaatgcccccacacactgccctctaccataagaggagagctgacctgctgcaaatgtggatatgctgtgcatagaagtttactaatttccattgccaccatgacaaatgatcacagattagatagaaaataaagtacaaaattgttctcctacaactctgtaggccaaatgcatgacctgtcttagccgggtgttgctagtaaacactctgtgggctctgggtaggaactatggcctttagtttcccagcttctaaaggccacttacattcttttgctcctactccctcttttcatcttcaaagctgcaaaaggcaagccatgcccttttttatataactgtaccctgatctatccacctctcgccttcactaaggactgatttaattatgttgagcccagagttgtttctgctaatggcattccatttttcttcatgattattatacagttaattgaaccatgtcctatgtcttgttgaggtttctatgtacagaattgaagaagagatatgagtggtattattgtgatttggtttatgtgacactaatacttgagcattggtcacttcacccaagtggccatactataatggtactcacttagtttagttatttgctgaaatcttcactttaacttttgataatatatagagtttgggttttttgtttgttttgttgttgctgttggattgctttatttttggtttggggatggtactaggagtcaaagccaggaattgtgcctgaacctagatagaaatctgagaagacagaaaatttctggtgataggaatttcctctgtatttaaaaccacaaactttataaatgtcttaaatggtaataaatagtaataaacatatatcttaatctaacctatttcttttaaatattattataactcagagactgcatagtcaaagaactgcttgttacctaatattctaaatcataaccaagttataaatcccctgaaaaatacaactatagtaaaattaagtactgtgaaaaaaaagagtctaaactaaaacctaaaataaaggaaaaaaaaaaaccaacaaaaacaactctgctgggcacggtgattcataccaatattctcagcactagcagtctttgccaaggccaaagccttgagcaatcgtactggattgaggccagccatgggtgagctgaaagccagcctgagccaagagtgaaatcctgtctaaagaaaactaaacagcaaaattcagtgcagcatgatttgctataaactttatgttgttaattagaacgaggcatatgagacaagttggccaatttctgaggtttggctgagaagcaccagtgcctgggtaagtttgcttttcagacggaacactgagttctgtgtctttaaaattaacagtgcagtcattgattgccctccagccccagtgatgaccatatgttcagaacagtacttttaagaaatggaaaatagttaagcatgttttaaagatcttataaagacatttaagaattttgtggaagttttttccacttagaaaaaattgaagtacagtctcccccagatacttatttactgtaccaggggtcactcaacaagtagaacaggggaaaaggaaacaacagatacagttttcccaaaagcatcaaccctgataaaatgagagttctctaaagatatgacctccccacccatcatgtttagactgttttgtatgagatttgtattgaactttgttgcttagttttcactggtaagtttgactcttactgttatttttatctttctgattagattttaagaatttatgttagtaccaaagtatgaaaattcattaaaatatgagttcccattgcttttttttaaggggggggataagaatatctcaaacagagttggaacctgtaatatcagcaaacttgcttctcttctcttcttggacacttttaaggtatcctattatttgaagataattattttgaaaaacatttgtggtgcaaaaccaaatgactgctctgaggttgcttaaccatttcctgtgactctgagaaactggctgctttcagaatcactgtgctgagtctcgggtgcagtgaactatttcactctcatcttcctgtaaagtttacccacacacatacatattacacacacacatacacatattacacacatacacacatacatattacacacacacatattacacacacacacacacacacaccaacaactaaagaaaaagaggctaggaatttgaaagagagttgagggtgatacataggaaggtttggagggaataatgggaaggggagaataatgtaattataatctcaaaaataaaaataattatttataaaaatatgttttgtttctgtaattcttagcaaatatccttcaacaaatgtaattgttttatgcatgaaattcttagggctctctttgaaggtatagttaagatgcaaatggttgtttttttttataacagcacttagttttttaacaacaaacttgaagtgttagtacgggagacactgggatatttcttttttccttcctttcttttctttctttgttttctcttctttttcttatcctcctcctcctgctcttcttcctcttccccctcctcctcctttttttttttttttttaaagacagtgtctttctatatacccccacccccaagctgtcctggaatttactaggtaggccaggctagcctcaaactcagagatctgcctgcctctgcctttgcctcccaagtgctggggttagagatgtgtgccaccatactcaactctatctcttaattttaatgagagagggagaaagtccatcttgctgtttctgtttggttagtgaatttagtggacaacataaagaaacatttttgaatatctatgactaagaaatgagatgttatataaattctggtagggcctggagagatggttcagcggttaagagcactgaccacttttccagaggttctgagttcaatttcaagcaactacttggtggctcacaactgtctgtaatgggatccactgccgacagctatagtgtactcacatacataaaataaataaataaacaaacaaacaaataaataaatatttttaaaattctggtaatagtatatgatgctaatcattaagaacttgttatgtagtaggttgtattctgaacgctttatggcttatataacttagtgaggtgggtagttctttccagtgattttatatattgtatattttatgtatgtgtgtgtgtgtgtgtgtgtgagagagagagagagagagagagagagagagagagagtattatcttcctccctccaacatagataatgttattggtactgcttacagatgagcaaactgagcttgaagggttacccagggttacataggaggtagcagaatgcctggttcctgagaagttcttaactgttctaatgacaaatgttctgttttttttttttccttatgtttctgaactgagtctgaagtatcagtaaggccctgatgttactcagtgtattgcaatctaagatattccatggaactgtagatctgatatgtacaatgtggtttaagtttggtcttaggagataaattattttgtgagaataattcagaggcatgttgctcactggtagaacttgagtccctcagaaaatatgatcactgaaatattggtggttatactatataagaagtaaggggttatatgttattttgtgaacgtttcacaaaatttatgacttaaaacaacaaccattttatttgctaattgttttttttaattattctctatttttttttaacagtctagactttatccctggtccaccgtctgactgtcctacatctcacaccttttcctcccatctccaagaggttgtccccactttaccccccctccccactccactagacctcccaactttctggggttaggtgcatcttctctgacttgagtgcagacctggcagtcctctactgtacatgtgctgggggcctcgtatcagctggtgtatgctacctggttggtggatcagtgtctgagagatcctagggattcatgttagttgagattgctggtcttcctataggatccctctcctcctcagcttcttccagcttttccctaattcaaccacagaagccaccagcttctgtccattggttaggtgtaaatatctgcatctgactctttcagctgcttgtcgggccttttggagggcagtcatgataggctcctgtttgtaagcacaccatggcatcactaatagtgtcagaccttggggcccccttgagctggatcccaatttgggcctgtcgctgcacctcctttgcctcaggctcttcaacatttttgtccctgcagttttctgagacaagaacaattctggtcagagtttttgctaattgttctttaggtcaataatttgaattaggtttaggtgaacgtgtcttctttctcgcctgaagttacttaagagcagtcattgtctgttgcgcctctaagatagctttactcatgcgtctggcagtggatgctggctgttggctgtatgtttttaatgtggttacccacccacaaggaagctagcttggattttctctaacagcgctgttagagtaataatgaatagtaaagtttacacagcctaccaaggcccagcattaaatattctggcaaacctttttgcttcatttcattgattaaaccaagttacaaggacagtagaaatttacatagtaaaggtaaaattacacttcctaagacgaggtccctggtatccaagtttcctgatttctttctaggctgacaatttatgtctttttattaactttctatctttctctctttctctctttctttctttctttctttctttctttctttctttctttctttctttcttccttccttccttccttccttccttccttccttccttcctttctttcttttctttgtttttttgagacagggtttctctgtatagccttggttgtcctggaactcactttgaagaccaggctggcctcgaactcagaaatccacctgctttctttctatattagcatatttaaaacattatttgtgggctggagagatggctcagtggttaagagcactgacagttctaccaaaggtcccgagtttaaattctggcaaccacatgatggctcacaaccatttataatgagatctgatgccctcttctggtgtgtctgaaaacagctacagtgtacttacatataataaataaataaatctttaaaacatttgtatatgtgtgaaagtttattccacttacatataaaaggaaaatcgggtaataaaaatacccagcataaccaaaccccatctcttaggaataatcactgtttatgtatgtttttgtctacgttgtatcctattgggtcaagttgatttaaatttctgtaacatacttttctttctttaaaccttatttattatttattcagatacctttctgcatttgaggtaaatatatattatctatataatactgtattaaatatgaacatactcatctgctactctaccaaaggttaatagatttctggcaacttgtttcttagtgtggtattggaaggtgatggaacctttaagaagtaggtctttggaaggtgatcgagggcaccgtccttgaaggaaataatgtatttttcctggaaccctgagttagcagtgcagagagggttgttacagaaccagacacttccttgctttggctggcttcctgtcttccctgtgttgctgccattttgatgttatccagcatgaggtgattcacataatcagagctacatgctctctggattcagcaagatacaaaactgttagctaagtatatcacttttctttataagtaccccaaatattaatagtaagaataaataggtagaatataaatcatttaccatttttttgctttataaaaagaatacagcaataaacattcacttaaatttttttattacatttacttattgtctgttggacatttacttattgtctgttggttggagcttcatgtggaagtcagagaacagctgtgtcaattggtttggttcagtccctctaccatgtgggacgcaaggagcaaactcaggtcatcaggtttggttgcaagtgccttcactactgagttacctcaccagcctctagatgtattttaaaagtttacttactatcattttgtttgtgtgaaagtgtgagcattgcgtatgatatgtgtgtgaatgcagctgggcatgcaccccagtgtcagtgtggagtttagaggacaggttgaggactcactgatgatctctgtcctctactgaggcagactctgttgggctgtgtagtataggctagctgacccaccagcttctggtagatttatctacctgccacagatgtgccactgtacccatctttttgtacccactgaatcctataggttctggggattaaccaggttggcatgcttgttcagcaagcattattacacactgagccagccatcttggaggctttttaaaagttatgtatcatttctttgtgtgtttgtaatgtatagccctgtgtaattgatacttttctttggtggacttggtgaaaaacattttagaccttgataggtattgatgagatgaatttaagaatcctctggtataagctcatcaataggtgtaacttagccaagctgagttttttgtgttgagagcatgttaaagagaagttttgaaaagctagtgaaactttaccctttcttagaaatgggaacaaaacactcatagaaggagttacagagacaaaatttggagctgtgacgaaaggatggaccatctagtgattgccatatgcagggatccatcccataatcagcttccaaatgctgacaccattgcatacactagcaagatttcactgaaaggacccagatatagctctctcttgtgagactatgccggggcctagcaaacacagaagtagatgatcacagtcagctattggatggatcacagggctcccaatggaggagctagagaaagtagccaaggagctaaagggatctgcaaccctataggtggaacaacaatatgaactaaccagtacccgggagctcttgtctttagctgcatatgtatcaaaagatggcctagtcggccatcactgcaaagagaggcccattggacttgcaaactttatatgtcccagtacaggggaacgccagggccaaaaagggggagtgggtgggtaggggattggggtgcggggtgggtatgggggacctttgggatagcattgaaaatgtaaacaaagaaaatacctaatttaaaaaagaaagaaagaaagaaaagctagtgaaaatgtaaattataaagaaaaaaatcttctcttaacattttatttatagattaaaatatacagacatagttgctatgttggctaattggctaaactttcgttttgtatatggatctgttggtggctgtttgtccaggaagagaactttcttcctttttctataggaaattattttttcattttttttctcttctgtcagtttctgttaaggactgcaatatgctgcttatgtttcttgcctctatccttgattttttatgttcactttgtagagcttccagacacggattctttgtgtcctgcagttctcttacagactttctttttttcatctcaaatgctttccaacattggtgcttaaaacatgtttcgtagctgcaaagttaaaccaactaggaattcatctttgtgtttctctctctagtatagaagtattaatttttgcccatagtgtacaaaactacagaaaatagaaattgtaaataggctcttcatataatacaatagttaatttgcaaatggtagaaactttattgaatcaatatatcagattggtaaattatacttggtgtctgtgtaatgtttccctataggttattttaatcagaaaagtctgaaaagtaggtaaagtttaattgtcttcttacaaattacagttgtaaaactacagctgcaaattacctgtttagttgtgtaaaggcaaatgagcttagctttaggtacacctgatccctagggttttttgtttgtttgtttgttttgtttttgttttttttttttttaactgtagctgtcttcagacacaccagaagaggacatcagatcccattacagatggttgtgagccaccatgtggttgctgggatttgaactcaggacctttggaagagcagtcagtgctcttaaccactgaattatctctccagcccatataaaataaataacacattaaataaacaaataaataaataaaacataaaataaataagtaaatctttaccaaaaaaaaaaagatttggtattagaaggagcttgctattgtcataattacgatgtgatctctatcaggccccaagtatcagtaaatctaggttcagtcttcgaaaaattaatgcatagacatgtgtcaccttcaataattatgacttaattttaatgtgttgggtgctacttttatttcaggtgttattgcaggcttctcctcttttgggcacagcatttaacaaggcaaatgacctgactctttccctcaaagaattatctgtgagtgaagcaaaatgtttaagtacagttcacatagaaaaacttcctgttctacagagtaaactagtccttggaattttattaattttacttccttcaatttttaaagtatgctcattatgctagaactaaatacagtgtagacttggaacttatattctgccctaaactctaaaagtttaaatctaaaccctaaacttgccatatagacaagttccctgtacagtttccagtgtcccagtttgacaggtggtttgtggtgtgaattgtggggagggaggtgactcatgattctggaatgaatcttttgactctccctgtatcctccatagaacactgggaggactgcgggtataattagcactgcacatctaattataaacaaaactccatgtacagtggttaccaggaagtaagcccgtgctggataatctttcaagttggcaggactaatttaaaataataatgtggtgtttactaaaagtcaagttgcttttccttgattgagcagaaggtttactgtaaaggtaaagtggattatgtgacagtactatctatggaaatcatggttatcaacttctagggcctataacagttctttgccatagtatttatacccttttcttcctatgaactatgtattttgtattttatgctatgctcatttaggcagtagaagagaactggtcacagaaagaaattctacagttagttggattgatttttaaaaggaaccagagatatgaaaaaaatattggactggtataactgctgaagaaggacgatttatggtatgaggagagtaagagctggagtaggaagcgaggaggggctgtggcagccatgcaccctgcagagaccttcagagaaatcaatgtctggaacacctatggtctcagagtccatcgagtggatgagcactgtgcatggcatgtgcttcgtgaaattctaaaagttcagctgaaacaagatctgatttagttagcttatgtatcagcttggacagtgtgtctctaagattcagagcaaagatactagctatggagattattacacatagctgtatcctaaacttctgtgtaggatggtcatatatttgcaaaatgggcctaagagttgtggttaccaaatgaagtaagaattttaaagcagatgcatacaaaggagcctgtcttagttagggtattactgctgtgaacagacaccatgaccaaggcaagtcttacaaaaaacatttacttggggattacaggttcagaggttcagtccattatcaaggtgggagcatggcattatccaggcaggcatgatgcaggaggagctgagagttctacgtcttcatccaaagacggctagtggaagactgacttccaggcaactagggtgaggatcttaagcccacacccacagtgacacacctactccaaccaggtcacacctattccaacgaggccacacctccaaatggtgccactccctggcccaaaaatatacaaaccatcacaaagtccctttcacttttcatattcaaaactatccagttaaaatttttaaatgtactggaacacagtttccttttacggaataaaaagttacaaaagttaaaatacagagatagatggagagagtgggagataggagggtgggaggtgtactttcttggcttgggtgtatggcagtgccactagctggttctggttgccagatgctttgagagaagggcaaatgctgtctctgacctagaacttctgatttgccttgttgctgcacagtatttgagatgtttggacttttaggtcagtttgtaggatttagaagcaaagccctgcctaccttacccctcagtggcaatttgctctgacttcctgttgttttctgtttggtatttcaccggtttctgctctttctttatttcctcttctaattactaatatttgatttactaggttttttgagctccttggaatgaaaagttctgttaactagttttgaacatttttctaggcattaaaaaaaaactaggaattttatgcttttattgtttgctttaaatgttttctaaattccttgtggtatctttgacaagtgattgtttggaattttatttttccaaatatctagaaatttgctgcttgagtttttgtttccattataagatgtagcttagtggtagagcttttgcttatttagcatttatgaggttctgtgtttaatccctaacaccaccgccaccaccaccaccaccactactgtttccaccagcaataataccaagtatatagatttctgaaatgtactgatacttattttattccatcttgctaagtggttcatgtgtattctgcatttgtttgcctcaaagttctgtagaattagctcagtagatgtctgtcttagtcagggtttctattcctgcacaaacatcatgaccaagaagcaagttggggaggaaagggtttattcggcttacacttccatactgctgttcatcaccaaggaagtcaggactggaactcaggcaggtcaggaagcaggagctgatgcagaggccatggagggatgttctttactggcttgcttcacctggcttgctcagtctgctctcttatagaaccaagactaccaacccagagatggccccacccacaaggggcctttcccccttgatcactaattgagaaaatgccttacagctggatctcatggaggcatttcctcaactgaagctcctttcactgtgataactccagctgtgtcaagttgacacagaactagccagcacagtgtcagttgagtagaattagctaatagccctgtgactatacttctgtgacctgtcttcttgccctgtgaattatatagtgatagactcttcagccatgatgattgataattcttttgctgtttgaatttcattttcctgatggatttgggaactctgtatttaagtatacacataactaagaagggcatgtaacattattgaattttaagattataaaatttctatgcagttaacttgtcagtgtctttaaatttaaaatatgccttaccaacagcatttagttgaatttagttccaaatttaatgtttaaaagtagcttaattgtatatgaggttgagcttaccattttatcatattttaatttaccctttacttttgtttcttatattgcattttttcctcttatttctcttacattgtatcttttgggtcaatgagcatttttttagtaacttattttctctctttagtattttctaattttttattttatattatctaattttagtattttatattttttgctaactatacatctcatggatttttttccagttttgtgtggccaataggattcatttttaacttactgaagtctatgtacagagtacattgaataacttcacattttacatttaaccctttttgtttcctgcttcttttcttgaaataactcatttgtcctcctcatttcacacttgaattcttattcagcttcttccacatttctgccatcaccccacttcttttcccaacatccctcttgtagcttttgtttacatagtttacaaatatctacaatgttatttcttactttaaacattttctttaaggaaattatggacaaatgttatttcttccttccgagatatctgataggtctgatattatttttgttcattttaagacgactgctctaaaagtcttcttatagtatataattgcttgagatgaattttgtcagcttttatctatgttgaaagtgcttacacactatccttgtttctgaaggatgttgtaactgtggatgggatgcaaagttgatatcatagttttactcttagccttaaaaatgctgtactattttctggcccaactgttgatgttagtgttgttttcccttaaagatagtgtggcactttgaggctcctttaaagtgtttatgcttctctttgctttaggagtttggctatgaagtgtctagtacaatattctttttaatttattcttgtggataatctcaacattttgggttattattattaaattgggaattttaactattcaaatatttctgtctcattttcacatgtgtcttctgggctcttgttaacttattatagtatttgatattaacccacaaatacctgatgtagtattcatttttcttcagcattgcatccctttgttccttaaattggtaatttttagtggcctgtcaagatcatgtggcttttttccccactatttccagttgctgttaagtcttattcattgattttcattttcattttaattcttgaacatttcagtactacagttatccagtggcctagtttgaccttccctaattctccctccccctccnnnnnnnnnnnnnnnnnnnnnnnnnnnnnnnnnnnnnnnnnnnnnnnnnnnnnnnnnnnnnnnnnnnnnnnnnnnnnnnnnnnnnnnnnnnnnnnnnnnnnnnnnnnnnnnncctctccctctccctctccctctccctctccctctccctctccctctccctctccctctccctctccctctgtgtgtgtgtgtgtgttagatgaagcagatgtgtacatatgggcatgtacagaggccagaggaagatgctgtgtgtcccctgttgcttcctaccttgttcctttcagacaaggtccttcattgacctgatgcccacagtttttgctaggctcagcctgtcttctcttcctagtgctggggttacaggaatgtgagtgacagccacctattttacttgggtactggagatttaaacccaggtcttcatgtttttgtagcaagtattcttacccattgaccatttccctgtcctctggtcccttttatatagtttcagtttttctggtaaaattctgtctgttcacatagaattatgttttactttttaaagcccctttcctttatgttttgggacatatttacagtagctgcattaaaagttaagtgtagcaactgacttttgatttcttatgagtaatattttcttgtgtaattgaatgaccagtgattttctaattacatttggacaatactgaagaaatagtgtagagggtttgtttgtttgtttgtttgtcttttgttttgttttttccctcttggagtgttggtattttaaaggaagcttaatttctgatcacctggttataggcttggttttatccttggacgattctcaggtcttgctacctgctcaagactcattttcaaattatttttcttttgtggatttccatagggcttatacagtcgaccttacttgagaatgtgacttctgttccccagtgtttcaaattgatgccagaggtattaccgggttcttgctgggcctcggttgtactgttggcacttccctacattgcttgacctctggtacttctgtttcctttcagggatattgttccctctctattatgggcctgtgctgctgtgtgctgcatttgacaaaggactctcaggaagttctgcacaagcctatgtggccccttgcacttggctccttttctctcttgctacagtctttgtatgcccgtcctgttctctttggactccagcttgccattctgctattagaaaatggtcccaaggcagagaagtagagttatttggggctcagtactatgtagaataaaggtcacagttttgtcatttagatagagaaagaattcaccaagaaaggaaaatgcagaagtagaccttattagctatactgtggtagactgcagtggacaagacagcaaagagaaactgtctagaggcacttcaagggactgctttttacggaagtgaggtttctggtgggcagtcaagcagtggttcaacggcagtgttctgaaacacctgcagtaggggcttatagtagttatcaacagtctggcctggaggcagtgatggtcttgccctgagtcagaaatggatcaatataattacctgtcctaaatttatatccatatccacttcttttttcttttagaggtcacattcttgatttgtctgttgtctaatatgtgaaaatacttgtatcatttgtgcagatgattaggtataatcttgtactaaattaactaaactaaaactgcataataccgcccggcgtggtggcacacacctttaatcccagcactcgggaggcagaggcaggcagatttctgagttcgaggccagcctggtctacaaagtgagttccaggacaaccagggctatacagagaaaccctgtctcaaaaaaccctcaaaaaactaaaacaaaactgcataataccatcaaggtttgtctgatttgcacagcaattttaatgtgttgaaatgaactttaacaagagtagttacatatacatatatatatatacacgtgtatatatatgtatgtacatatatatagatatccctccaactcttcctcattttttttccttctttctaaacgatcttgctgtgtttcctatgctaactttctatccctgggggatcttcctacctcagccttagaaatagcaagaccaagaagtgtatgccagccgctgccactcagcttggaaaagtcaatcctggttcccccatggcagaataatttctccatgatcttcttgctttatgtctgcagccatatactttcttttccatgaaagaagcacattgggttaaaagaacattaatggagtttccaactggagatagtctagaatacattatgtaaatgcttttctgtttacggcatttggttttatatcagtagatcatgtgggagtggtctcagaagcaaaacaatggctatttattattatagcttcatttaaatatagtgagccttgtatcttccaggaaaatttgttataattaggtattatgcttttggggggactttatcatgttaatttaaaatacatacgatttcattatcccagaacatgagatagccttttaaagggattgtacttacggaaagtttgcttcttttaacgcaagtctcttgctatgttatttatcatggtttgcacctttgttaatcattctcttgcgagcaacacccctctctcctcaaacacttccttggcctcttattatatcctcctgcttctgaagctcaggagtcacgatttgtttcttatttgttttaatttttgtctatttttctattttaattgtggtaaaatacacatttttttttcctcttaaggcctgggctggtaagcatagggctatgtgaatacttcatctgtaccctgttcgtgagtcagagctctctgatcctcttttgggacctgtcttttattactctcctcagatatctttgccttttccattcttgcatgttgtgctgggcgtctagacttgtatctcctttcacagagtttactgaggttgtctgtgagtctccactgggatgtgatgtttctcagtcttcacttccagccctccaggctcagtcatgatcatcttcctgggttcttgtctcccttgagtcctctgagatgctgtccctgtgtttccctcagcacttcctccacctcctcattttattttccttatttttcctttcccgtaccaaatcatgtttaagttgctgcttccaccttaaacacacactaacaaaaacaaaggatttcactttcctacctacaccatatatatttttaaacattatgcctgtgcttttcttcaataaacagcctgtaccttgctcattgtttccttgggaaattggaatatggcttgcattcccatcttcccaccaagagcccatcttgccaaagttcctaaatttttagttgccaaatacagggactggggagcggggggagatttctagccctagttttacctggtcttttacatacatatactgtcagtcctattccatataaaaccatgtgaaaaccattggtttcggcatgctcttctccggatttgctcatctgttctatcttactttcctgggctgtccatcttcctctacccccacttagaaactgatactctctgacttgcttccctttcggtggtttcagctactgtatgacttaaattatgatttagtattttaatcatctgtctgcattgttcttttaagcccaagacttgctaccatagtcctaatgcaatcttataaaatcatggtgtctacatttttggtaggagacttgagactaaaagaataagtctataagagccaagattcaaacattcatctgaaaatgaaactgtaacctctattttatgctgctagttaaacatttttaagcagctatctggcaaacattaaatatatcatggtccatgtgctgtgcttactgctttctttcatagggtggggcagagagggtcagaaagaaatgaagaaaactgcagaaagacaaacttgaaaacccgtattcttaatcttggggtctgatttcccttcctttcattttcctggccaacatgaatttgtaggacttgatagttgcgaattaaatcatgcctttactgtttatatatgtgctcgtaaaacttcactttctttttggtttcttttattttttgaaaggggagggaattgatatagaaatttggtgtttttttaaaagaaggaataagcccaataccagtatagagtaaccttataatcatgctaaaatcaaattgtattgatgtaagattcaagacatttcaaaaacaaacaaaccaggtttaaagtgatgtcttttgactggcctgtattaaaagtaggttccatcaggttggtatttagataaagatgattatatagatcaaaactgtgttcttctaatattcagtaaaatatagcagttagtttggtgtgctttactactggatgggtaacgttttatgtaaatattaatttgatgaggtttaattataaaaataagttatttgcattttggcagagtgctgactggccaattcttaaatttgatgaagacagggcaaataatcaactgttgaatattccttggctttaaacaggtcatggctaaacagtcttttttttttttttttttatgtcaacttgtcccaaggtatggtcatatggaaagaaagaatcataatcaaaaaaatgcctccatgggagtgggcagtaggcaagtctgtagggtattttctgattgatgattgatatgagagggcccattgtggctagtgctaccctgggcaggtggttctaaaataactgaacaagcccggaagatggagccagtgagcagcactcttccattgtctctcctttcgggtttctgctctgacttctctcagtgatggagacctcagagttgtaagataaacaccttccttcccaagttcctttaaatgtggtgttttatcacagcaatagaaaccttaggacagcattcagactcaaaaagttctgatggatcctagtagatgagtggtgatgccctaatattaagcactaatattacccaataagagacttttactgaataagtcatgctgactcgagctcatgattgcatctagcatagggtgagcaagatgcttaaggggcataattttatctctcataggagtgcaaacacatcagaaaggttaagaatttattaagggcttacaaacaattttgaataatatttcagtgtgagattgcatgaatgaaatgacccttttggtggaatgagtaagaagtgacacccacgggcttccctatttgaacattcagtccccgtatggtggtgctctttgggtggttatggaacctttatgagattgaaccttgctggagaaagaatatcactgtgggatgctttgagtttatagcctcatcccacttcctgctccctttctctttctcttcctttttctgtaggcatgtcatacataattaccagctaaaggagactcaaccctctggatcccaagccaaaaaccccaaccatttcttcaaattgattttgttcttgatgttgatcacaacattagagcagtaattaataaaccccaaaatatctattgaaaccaaccatcacaaggcaatgggaacaatattggaagtttagaaaattaaattctttaaaaaaaaaaaaaaacaaaaaacaaaaaaaacaaaaccaagatattgtaactactgttctctacacataccattgacagggaatgggcaggtggctacttgctaaatccacacctataaatgagtagaaattttattcaaatagatctttttattttttaatttattaatcattctatttgtttacatttcaaatattacccccttccacgaaccccctaccttatccccctcccctttgtctctaagagggtgctctcctacccacatactcacgcccgtgtcacccctctagcatcccccttctttagggcatcaagcctcgacaaaaccaaatgcctcccttcccactgatggcagataagatagtcctctggtacatatatagctagagccatggacccgcccatgtatactctttggttgatggtttagtgtctgggagctctgaggggttctgttaattgatactgttgttcttcctggagttgcaatccccttcaggtccttctgcccttcccctaactcttccattggtgtcccggggctcagtccaatgcttagctgtcagtatctgcatctgtcttagtcagatgctagcagaggctctcagaggatggccataccagactcttgtctacaagcacaacttggcatcagcaatagtgtcagtgtttgctgtctgcagatgagatggaacccatggtagagtggtctctggttggtttttccttcagtctctgcttcatttttgtctctgccttttctttagacagaaccaaatgcctcccgttagacagggacaattctggattaaaaattttgagatgggtgggtggccccatccctccactgagggtcgtgcctatctactggaggtcatctcttcaggttctgtctccctgctgttgggtattttggtttatgtcatcccctttgggtcatggaagcctctctcatccctggaggctgggactttttctagtggctccccaagttcaccatccctcccccacacacacacacacccgctacttatttctactagttctcctggctctctggacttctatctcttcccatacctggtcctgctcccctcccccttttttctctccccttcccttctcccatccatagttgagtaataatactccatttgtagtagtactccattttcaaaatgtgtataaatgtaccacattttctgtatccattcgtctgttgagggacatctgggttctttcgagcttctggctattataaatatggctgctataaacacagtggagcatgtgtccttgttatatgttatatgttatatgttatatgttatatgagcatcttttggcccaggagtggtatagctgagtcttcaggtagaactatttccagttttctgaggaaacaccagattgatttccagagtggttgtatcagtttgcaatcccaccagcaatggaggagtgttcctctttctccacatcttcaccagaatcagctaagtttttgatcctagtcattctgattggtgtaaggtagaatctcagggttagttttgattggcatttccctgatgactaaggaggttgagtattgaatgtcctaatttctttaggtacttctcggtagcataatttttaccaatttcataatggagaagtagaaaatggttggccatcttactctagtttcttttctctctaaatcagaagtgcacaaaagtacgaatgacagttaactcttaaaaggaaatgagttctcttgacaatgttctagtgagtttagttacacaataacagatatgtactagactgaatgaaggaagaggaaatcatgacatccaggcagaggaactaagtaaaaaaaggcctgccggggagagatttcactgacttgttctcagggtaagacagtctgctatggtctgagcacatctaggaatagtgtggttggtgcctgtagaattccatcaatgcttctgacatgcatgcagatcactgggtaatctcctgaaattcctgcctggaagggaaggagtctgcttttgtaagaaggtgtgacgtaatacgggtactgtggtcttcattctgtactttgagtagcagttgtaaactttactctaatatgagtagtgtgcatttattttgtgagttatgagttaccactgtttattctttattgagcactatgttttcctgtatattaagtaatgtcagttatgttctaatgtcagttataatgaaataatatttttaatttcattaccagataccaaattgttaaaagctcttccctttcattaaattaacatgagtcagaagatgcattacattaatgagaagattaaaatttgaataaattgttttagatctgggttgaaatgtacaattaaatacctgtctaactttaagattaaattaatccatttatgtttgtttttttcatgccttaaatttaattttgttactttatagaactcttgtgaagattagaattaactgtaaagtaccttgtgagaacaaattaaagatgatttcaatttgttaaactcttgaaatcccttaaaagctgtgatttttaatgtaaaatattgactgtcctaattctgagttattgagagatatgtagtattattttccctttgcttcttccgacctttcttcagtgattcttgacaagtatgaggggggcgggttatagcttagaaagcccccactacgtccctgccttaagatatgctgacactcgtggtgtttgttctcttttaaagatggaaactgctgttcttgtgaatgctacaggagggtgaaaaagcaggtgtttgaactgtagttgacctgttttttaagttttttgtctgtgatactgtttcttgcttaccaaaacttcataagttattttctgcttttattttgcattgggccagaaacatccttctcttgtgtgtgtgtgtgtgtgtgtgtgtgtgtatacacatttaaaaaaaaaatcagtgtgattccatagtcgtttccttaccacagtcctgcccgccatcttacccaagcaatcgcccgttctcttgaggagctcccttttaagcctagaagcaggcagaccagtttatgatttgcctgagggagaatgggtcacaggaaagagacccacaacctggttttatagtatttggccaagaattataggtgtccagacccagaagtaagacattgagtgtcgtcctttcctttcggccccacttagtcctagctgtttagggacaaactcagttagagatggccaagtaatatcttctaaagtcaagccagggacccagaaggttgggtaggactgtattaaggaaaatactatgaaatcacagctgttttaaaaaattaatatactttaattattaaaagaaaacaaattcaagtcaaatatattttgcataccaaaatgatccaggcctcaagcctttatacagctcagtaagcttcaatagaggtacagtcaccaaccttttccaccattggatatatttttatgcactcagtgactaccaacaatgagaaatcaatgatagactagaactagaaaaacaattagctttataccctcttaatagtttttattttgttgttgttagttttggttcgcgattgtgattgtagtgtgcttttttaaatatatgcttgggtttataatgagtaattcaagaataccataaaacctttatttaattcaaatagcattgaaatggaaaaaagtcttagtgtttaaaaaaaatcctcaagtgattagaaatgcactaaatttggtgttttcaagaaacattatcttatgagctctcccctacttctatcttatctttatttcttaattttgtagatcggcttcagcttccaaggaatatgatcgaaaacagcatgtttgaagaagagccagatgtggtagatttagccaaagaaccttgtttacatcctctggaacccgatgaagtggaatatgagccccgaggttcgaggcttctggtgcgaggtcttggtgagcatgagatggacgaggatgaagaggattatgagtcctctgcgaagctgctgggcatgtccttcatgaacagaagctcaggcctgcggaacagtgcagcaggctacaggcagagtccagatgggacttgttcattaccctctgccaggaccttagtgatctgtgtttttgtcattgtggttgcggtctctgtaatcatggtgatttatctactgcctagatgtacctttaccaaagaaggctgccacaaaacaaaccagtcagcagaactcatccagccagttgctacaaacgggaaagtgttcccatgggctcaaattaggcttcccactgccattattcctctatgctatgaacttagcctacatccaaacctaacctcaatgacattcaggggatctgtgacaatttcacttcaggctcttcaagacacacgggatatcattctccatagcacaggacataatatttcaagagtgacatttatgtcagcagtttcaagtcaagaaaaacaagttgaaattctggaatatccatatcatgaacaaatcgccgttgttgccccggaacctcttctaacaggacacaattataccctgaagatagagtattcagcaaatatatctaactcttattatgggttttatggcatcacctacacagataaaagtaatgagaaaaagtatgtaaaactgaaatggttcttgttctgtgctctgctgcatgtaacttctacaatgcaaataggaccctttgtcacaccatagatattttaaattcagaggtttcaaatttacgaagttatatgtacagtagaatggcaatatgggagaatatacttcttttgagcttttcatgctttctgagatgaatattgccatccttccatgaagctgtaaggagtgaggagaatgggctaatctacttgcaggcaggacttaaggaggtacttagtgagttggagaaagagaggatgaaatatgcctatgtatatccttcttaatgtccttaatctttactggttcactttttaaaatgtcagtttgagtgtggaatctctaaaattgcaagcagaactctaagagaaaccccagagttatctcgtctaatctgatttttttttcccccgaaatctttggacctagtgctacctagttagaaaaattaatactgtgcagtagaattcagttatttttagtgtagttgtgtaaattctaggcatgagctgggttgagttatgttaaaaaaaatgtgggtccttgaaactaagaaatagagaaattaaaatagtatcttaaactgaaagtttagaatgaacagaacataagttcatttacttgcctcttaaagtgaagtacccacatgattgtctatcttgagagtacatataagtttagatcattcttaccttcaggatgtctgaaaattattaatcctaagcaatgttgtatgttttttcaattttgctggaaacttttatattggccccactataattaaatatttaaattgatagagtaattagggggatgcatttcttcttgcttgaaaggcagctcttcttaccaccaatgctcttgttgcctggaaaaatcacaatgtctgtaaatgctttgaagagacactgcttgtggtcaggaaactttgcctcctttccacactgctgccaacataatctatgcctatttttatctttgcacttgtttctgctagaggcgctcatggtcaccttcgatgtacaaacattttacagttcttattcctaacattttgacaatcttcattatctggcctttgttttctctcacagcccttattctcctatcatgttgaacactctattcctacaactaagcataacagtagtcagtatttattgggaactgaaatactagaaactgctcagaacatcttatgtttctttaatcttctaccttgtcaaactaagaaatgctaatatattcataatagccaaggatgaaagtgcttataaattactattataaagtaataatagtctgccaggactgtcagggagcagagagggaacccagacctttccattgtattgaaccacttccccagttcatacttcatttcttttgcacattgtttttgccagtgcttaagattctcttactcacctcccagctaattcctgtcctgacttgaggatatgcatgcttagcaagtgtttctgagagcaaacatagtcacaaggaaagaataggtatcaagtttcacaatagagaagacattgtaattgtcttcaaaatgtagacttctcatagacttgtgtgagatagttgttttattgcttgaacaataacttaaaagttttctcgtttgtttgttttgacttagaacattaggatctatagtcaggcatgaggaatgcagttgcagtcccagcacttgggaggtagaggcaggaagatcaaggaggtcgagaggcgcgcgcgcgtgcgtatatgtgtgtgtgtgtgtgtgtgtgtgtgtgtgtgtgtgtgtgtgtgtttgtgtgtgtgtgtgtttgtgtgtgtgtgtgtgtgtgtgtgtgtgtgtgtgtttgtacatggtgagtatgaggccaatttgggctatttaagattcagtctcaaacaaaaagaagaacattatgatataatttttgtctataaataggcctctctaatgtgagtagtagggatataattagactttatcctattctgtttactgggtgaaaatgttggcagtggatgaataaaaggaatgagctttagaaatcgcatggttatcagatgaagttcactctgcttttactgggcctatgcttatcaggaaagacataatgactttacgtgcggagagagttgtagttacctagtactagtagtaagcatcgatgtagaaccacctaggtagcctaggtggttttgttagtttattgtaaagttttcctggattctggcaaaaccctaaggcttggttcagggagacctggctcaaccataatatgtaacatataagacagagatgtaggttacagactggacagagtcatggagctaataaatgtagaccccaaattcaaagcactcttttctgcttatcttctaaaagtggagtctagcacagtgggtgctgtgtccacagtgcctgtgaatggcatagaagctggcataagagaggcctctcgctcgccccgctactctgcttgtgtagtcttcaagtggaaatcactttctcctgagtgaaaatctaccattagcccctgctgctttttgtgattttcacaggcaggaccatctctaaaaaggaaagaggaaagcagaatgctattaaagaacaactggtttttctattttcatgaaagtgcatattgtagatttgagattcagtgttgtgaacccagctggttagtagctgctaatgacaatcctatggacttctatcagaaactcaagcctctccgttggtgaatcccactgcacttagcagctgctccagcttgtagacgcgtattgccttctttccttatgctgccgtctttctcaagtgtactcttcaattctgtgctttatcaagtgtgcttgatattcaaggacccattcaggttgggtactagtttctttatagtgtcttcacctgcagaagaatttgtttcacaccatttgatcccactaatgtgcttccactgttagcaatacaatttgaagcctgcaagaagattctgccccctctaggcctctgctctcctcgcccccctcaacccctttagttaatagtaggtgttttagaggctggaattgtaatgtatttttttcttcatagccctagtactttgtgggatgccctgtctagtacgcactctaactattggaccaaatttgcatttctttttaggtactttgcagcaactcagtttgaacctctggcagcaagatctgcttttccttgttttgatgaaccagcatttaaggccacatttatcatcaagatcacaaggaatgagcaccatactgcgttatcaaatatgcctaaggtactgggacgtgaaggtgcaatatttggatagatctcttatctctgagaacagttggattcctctttactattggtagggatatttagaaacatatgtgtatatattctttctgaaatagttagatacaaatggaaagaaaagtactttgtcagtctgaggaatgcttgagaaaggaaaagaccctgcagggcttagaatgcatgcgtaagaagtgtgaagtgtcttcctgctctacagtagcacaaatactaacactatgaaatagtataagctgagtaaatgacttgagacataatgaatttgctcttgtaagcattattgagactatggaattgtgatcattcttagtgttttggctaatgaaactctggattattgtcatgtggaaatggacaagaacaggagcctttttcttgttagttgcatgggaggtagtaggggtaacaccaagtagaagagttttatgctcaacagaactttattctttttgtgtctgcctgaatggctagtgcagccggtgtggtacttcctagaacctgtatggctagaggtgagaagtagccacaggtagcaggcaataccatctaccatctacccccatagccatcagacagcatgagctttcattgtcacagtcaactcatcaccttaatatgactcttaaagaggtgggcacctacttcacactaacccaaagcaaaacctgattcatggttgggaaattttgagagttcctggcatttcttcacctttagtcagtgacagagttctctagtgacttaatgcttttgattccactaacttttcctgggggtactccatggagcactagatcatgtcagggaatgttttagctacaattccctcttgaagtcagtgatcctcaggttatggaggtagggaatggggaaggatttgaattttgctacacttggaagacagaacaattgctacagggaacaaatatattgagagtcatgttgaggttctcattatactctgtgtcttcttgatcaagagaagagactgaaaccattatctagaaatttgtgttgaaagattaaaatgtctatttattacttcatgaatttttaatttcttaccgtatttgtcattgatcctttagttacagaactgtcatcttcctttttttttttttggctatagaagtcatcggtccctgcagaagaaggacttattcaagatgagttttctgaaagtgtgaaaatgagcacatacctggttgctttcattgtaggggagatgaggaacctgagtcaggatgtaaatggaactctggtatgtccgtgctctgattgtctgaaagctggtgtatagtagggtggtggtagttcttggtggttaccttatgaatacaagcttttagatcggattttaacatgttacaccagaaataccactctcatttaactcatatatactactattcatttgctgtctgaaagttagtagttttcaagtttcctattttgtgagaattatagtaagataacatattatactgacatttctagaactgtactgtagaatatgatggtcagtagcctgaaggaagccaggacaggaactcaaacagggcaggaaacaggagctgatacagaggccatggaggagtgctacttactggtttgcttctatgactttgcccaacatgctttcttatagaactaacaccaccagctcaggaatagcaccactcaccatgggctgggccctcctccattaatcactaattaagaaaatgccttacagctgaatcttatggtagcattttctcaatagtggtttccttctttctgttaactcttcattgtgtcaaaatgacataaaactagccaggacatatcccaagtgtctctcaagcatcctggtacactttgcacatttgatttcatttcctcctggtgcatctcatcagtcattaggaagaaactcaacactttctttatgcaaggcactatgctttcggtgatgtgttcagttttggaaggccagtgtgtcccttagatcctacaggctctattactgcttttcattgcaggtgataaggtttgggcctgcttttgttggctcgtatttgtttttattacttaaaggcacaaacgggttcaacctaccaagtcataactgtagttataaagtctcttaaagggttcttggactagatggcaagaaagcatttagactataactgccacggcctagttgccagggggctttcatttgactgttactaggatatgatttgtttgtttttcttttcctcctttctttattttttaaattgtttcaacctacagccttaaacctgctaaccacctcttgtaccacagagctgcaccccaaatccccatacagtagtaattgatattctcttacccaacccaaaatattgtttaaggcatttctcccctggtatgcatggtagtgaagacctgtaaccccacctacttaggatgccgaggcagaagggtcacagtttcaagacattcctgagctacaaaatgagttcaagactgagcctggagaacttaatgagaccctgtggccaactaaaaagtaaaaagaggcctggggaaatagctctgtggtggggtgctggcatcatatatgtggggctgtagtttaaatctctgagaccacaaactagcaaaagactttttttttttcctgagacacatagttctctttgtttattttccactgttttattattttttagaataaggttgatataaatataatgagcagatgataactatgtattaagaagttaaaagcacatgttctttaaggaaaagaaaaaaattagaaaggaaaactttcaaaaccctttctcctaattgtgtgccagaattgagagtaattgtgtcacttggtcaaatttcagtttcttttataatcatatcatattacttaaactgtgcacttatcttccaaatagagagaggataggtatttaagtaatctctgtaattctatgatttgcttctgagtgtgcagtctgaagtgaatgagcaatgtgagacctgaatcatagttagagtgtctcatgatacaactgttttttattacatgatccatcaaagcaagccaacaagtgaagttgatatttatttatgagtatatatttagtgcctactggatgacaggcacaataacaggcaccaaaaggattaacaccttagttttgtgctgcatataacccatcttcacaattcataagtaagagcacttgtgagttataagagtgtaagaatgtatcattacattagggtcagtgcttatactttgctctgaggtgtgctatagtagtttatttgagatattggggaaagctttaaaaaaattaaaacactaagtaattcttttgtgtaagtatgggtataaatgacttgtttgctggtcctaacagtgctcagctgagtggcatgccattttaatcttacctgcctttacaccatggattatgtttctcttcaggtttctgtgtatgctgtaccagaaaaaattggtcaagttcaccatgccttggacacaactataaagcttcttgagttttatcaaacttactttgaaattcagtacccacttaagaaattgggtaagagttagatagttcctttgattttcattgcaatttataacaaagatttgcttcataaacaatttttttaaaaaagcctttgccaaatatttttaaaagaaaaccaagaaatttttaatgctgtagaaattttatttgtgtacggttatttataatctatacatctgaacttaacttagaattacttagataacttaagtttatggggttgtagaaatttgcttaaggctccatatggagtttgataaattctaacttcgaaggaatttcgggttcagatgggaggaggagatttaagttttgtttggcgtgacactggttctgaagaacaaagtggggctctgactgggcttggttgtgttcactctaatctgattcattgtgaaagaaatgggctggcgttgtccttgttaggggacagtggaattgctgatcaggtcttcctcagctgatattcaggtaccgagcatttagacgtagggacaggaagattcagcatgttaaggatcatgaaagaccttctactgggcagagtcttgacttagggagttctttaggtgagaagttgatctcttctgtcttgacatgtccagatttggtggccattcctgactttgaagcaggagcaatggaaaactggggcctgcttacattccgagaagagactcttctgtatgacaatgcaacttcttcagtagcagacagaaaactggtcactaaaatcattgctcacgaactggcacatcaggtatcaccaacgcacaccgttatatctcactccctagagttttagtaaatacctgtatgttactaagcatattactattttgtggttttagtgttgctattatataaaatgacaaagggaagaatttcacctttaagctatttcatgtccattgtctcatctcataaacgccctatggtgggccataatcccattttacaggaagacaaatttatgaaatgatttgttcaaactcacacagctgtgataccattaagcctcgaagaataactatatattcagattatcttttttagtatcccagtgctgggaccaagcccaggactttgtgtttgctagacagtgctatatcattgagctaaattctccaaccttggaaaatcagtttttttctaaattgtacttatctgtgccatgtctaacaactactggcttctcaatgaaaccttgtaggatagagcgttttccctcagttacaccatctcccttattaagcagaaccttcttactgtgtaactaaatttctcctatcttaactcaactctcgagtaccatttcataggtgtgggctatcatatccagctttctactaacgagtcttgaatcacagttgtcaggaccaattttctttttcttttttcctgctacaagttggttttctattaatgtagaagaaggagctttccctagtgtagagtaaaggaattctctgtataagatgaaaaaaggaagaaaaaaatgttcgtgaacattcccatttccaacacattatctctgttgagccctcaatatgagatgcttttcagtgggtttggaagctgtgaggaagctgtatttgaagaaagactagaaagtgctgtggccagttaactttgcctcagacatcatctatagatggctgtgacccttggaagaactttttagcaagctgatatatcaagcatatacttactgctatacatgagctgaaagaaaagtggtcttttgtgagatttcttctaactctgtagaatctgttttttattttatcttctgtttggggcttataacttatcttcctgttaaacggtttttaagatactacctttgaaaaataaatgattgctactctcaaatgtaattgtttgttttattaataatgtattttttgctactgttgtgaaataagccccataccacattgacaaatttgcataccccatgaccactttttttttgcaaatgtgggtgcatgcatgtgcatgtgtgcttgcgtgtgtgcatgtatgtatgtctgtgtgtgtgtgtgtttctgtctgtgacagtgcatcaggagtcctcttccagcactctccacctgtcctgaggcaggatctctttctgaacctagaattcatatcttagagaggttgggagccaacagaccccagtgatttacctgtttatatgtctgtaaaactgggattgcagacagtttttagagaattacatggtggcttcttacataggtgctgaggtccaaaattaagtcctcaggattgcagggtaagtgctaatggctgagccatctcttcatacccaaaagtattttgaacatatgttatttaggaaggtctcttacctttttccttcttcttattactatatataagaaaccattgaaagattactctgacttcttttgtgcggtgtgtgtgtgtgagagagagaatacatacatacatgccaggtttctataggaatgttacttaaattttagtcagaaagaatcatgtgttttgaacctcaggtaatggaagaaaagcatgaaatccaggcagatcctctgacaataggaaaatctttacttgtcatggatgattttatatatataaattggaaagtaatcttacagagttgatattagatcagataatttcattatctaaggagtttcactttaatgaagcagcttaaaattttcattacagccaggcggtggtggcacatgcctttaatcccagtacttgaggggcagaggcaggtggatttctgagttcgaaaccagcctggtctacagagtgagttccaggacagccagggctacacagagaaaccctgtctcgaaaaacaaaaaacaaaaacaacaacaacaacaaaataaaccattacctatataaaacatgttgtatatagcatatgttaaaaattcacacatattttaataagtaaatatagtctttcctgcttttttcccaccattcagtttaggtaaaatgttgaactttttattttacttctaaaatcaatttatacagctttcaaaatcctttcttttttgggatagtttgtataacttttataagactttaattattctgggtatagattgttttaagatattttgattatcttcaattagcctgatagtccattcaattaagaaattcctgagtcctgctggtgacgaatttgtctcttacagtggtttggaaatctggttacaatgcagtggtggaatgacctgtggctaaatgaaggctttgccactttcatggagtatttctctgtggaaaaaatattcaaagagctcaacagtgtaagtactgtgtttctttgtcctatgaggagggaatagccacattataagttagtatttaccatatattttctacatatttgagataatttgaaaaaagttaaaatcagtaatgctggagacttgacaatgaaacccactcttgcatattgaagtatttcattaaacattaaaatgattattttttactttaggatgattattttaactattacattttattttataagatgtggtccttttgtttgaaggaatgcagataaaattggaaaataacttaaatacttgtataaaaagaaatgaaatgaagactggcttcatactgctttttatattgtcactgagtgcattctttcaacagttcttaagtaacataagttgcttaaataaagaaacaagggcgggagatatggctaagcagttaagagcactagttgctcttccagaggtcctgatatcaattctaagcacatggctcacaaccatctataatgtgatctgatgccctcttctgatgtctctaaagacagcaacagtgtactcatatacataaaatagaatcttttttaaaaccaaacaaataaattactattgctgcatacaaaccatgcatttgtttcaaagattgaataccattctgttaaagagaggtattgtgctgtgagtgtgtcattagagactggagatacttcctgtactcaaggattttcagacaccataggtcataatttcataggcattgctgaaataattcaagtattattgggtagctgaagggaagcacaaaacatgtgcctctcaaactataggacagtctcccacatagtattgtcttcaaccctaaaattctgtgacttgctcttagacgcttacatacattttttaggtatttataagaagtattcttgggagtttttagtttgacatttctgtatatagggcttgattccgactgcaagtaatttttagttgagatacgaaataggtagtttaaataatgtgtgctacttaattaaacattgaaatacagagtctcaccacttgggggtgctgagaacactttaaattctaatatacattctagggacactcttggctgagctctcaatgctttcagaataagagttgtattttcttttaagtaacctctaagaattatatatcactttaatagaaaatcaaggtaaggaccccatttctgccctaagtttcaatttctgttttaaaagtctactttaacctttgttgaatatttatcttggatattcagatttggaatttgcctctgatagtcagagattctcaattttacagttatgctctcttttcagaaatgcagattctcacatgcctcagttctcagtgccgttttaagcttaaggaactgcatacaatttactttcatttgtttatatgctgcaccttagtgagcccaggtgtttttcattctgtagcaattgtgcctttgtatcggtcatgacttcctactgctttatcttttgctagtatgaagacttcttagatgctcgatttaaaaccatgaggaaagattccttgaattcgtctcatccaatatcatcatctgttcagtcttcggaacaaatagaagaaatgtttgattctctctcctattttaaggtatcactgtgcacaaagaaatgtacttttacaagacttcaaccttattttgtaggtcagcaaacagcgtgattcacattaaagactgaacaagtgttgcctttggtatcctattgaagttttaactgtttaaattttaaatatgtaaatctgtttggtcttaacgtttgtgtttctgtctcccttttagtcagtgtgactagttttcaggcagtgaagcagatcatgtaagaattcatctttcaaagttagttttctccctggatctgtccgtagaatgtgtgcttagaagagcatcctaagcaaagccctttattgtggtactcagaattgaggtattttctacaatcaagatcaccaaaaaaaattaagcataaaaagttattttagtaattgacagttctccttcaggatgtgaaacattagacaccaggacagtggatggaaagtagaagctggcttcattctgagcaggttggagaacagagggagtgtggtactggtattacctgaatggatgctgtacaagggtgatgctaaagcttatgattggttgtcagagtccttggatagtaaatccctctgctagatagcgaagaaaatacattaagtgtgaggatagaaaccatactatcaaaaagctcaaaattaggaggtaaatacatgtgaatgagcaagagaggctgtgtgtgctgaaatagtacaaaaaatgtatgcatgttgaagagagaagccaaagaacacaaggtagggcagatatggactttgaagagaagagccaggagggctgatggattcagagatggaaccaggcttaggaaggtaagaaagaaagcatgagcccagctacagcaggtcctgagtgccataagaaatcgatgatgtttttttaacataaggatgatttgattaaagttaatatttagaaaatttaaattggattcagttaataaagttgattccgagaccacaaatgggacatgacactgaaaatcagacatgcagagtgaacgtttgcaatgaatggtcatagcaatgggaagaaaacagatctaaaactaaagggagttttgtacttgaaggacttagtgacagggtaaaacagataaagaaggaggcaaaaatgttgtctggattaaagcctgatgaagtaaataatagtacttttaacaagaaattaggagtttaatgtgagtatacagaggcactaattttttcttatctgcagtttttctttcaggcttcagtaaactattattagccatcttaggaaaaatactaaaaggaaagaccagaaaagcagtctgtaaattttaaactacatatcattctgagtaatatgtcctgcatgggcatgagccaattttccagtgtaaccatgttgtatatgcaacttctcaaattatcactaaataccatctcagttcccagattaactggctcaattagggcttgtggtcagttatcttttatttattaatgattcctaatgtacaagagttatgtagctgccaaagcaaaggtatgaagtggttcctttaggtgactaagtcaaagttcttaactttataaagaaagaaaatcataggcctgtcttgctaagatctgcactatagtaaaatattttgaaataaactacatttacatgacttattatagtaagtatattgcttataattatcttattaggaattattaatattaaatatgcctaattcatttattaaactgtattataggggaaaacattgcatatgtaaagttttgtgctatgtgatctactagggggtcttggaaattatcccctttggataagaaaactattatattccagttatttggtgatttttaaagcccatacatgaatggtcagtaaggaaaaatctaaaatgtgtttctgttgctatacagagggtaaaaaaatttgctatttcaagacatgatataacagagttctgacaccaattaaccacctaacgccagaattcatgctttctcattataagatttcagtaaaatacttaacccctgacaatatggtaactacttattttacaattggaaatttgatgaatatcccacatcactgagaaaaacagaacacagaataattccagtattttgtgcaagaaaaaacaaatggctggggaagtgtgtttaacagatatattccatttgttcttcatagtcaccaaggcactgatgtagggtgctttgtgagggttcattcattagccagttttgaaaatacaatatgccagtcactaaactctgcaggttcttcaggagacaaactagacagtgtttctgtggagtatctaaacctaagtatatataaatcagggggctaaagccaatagagaacaactagaaagcaaatttaggtagggaaaagacagccccaaggattgaaatagcagggcaccaaactttagtcattggaaagataaatcagaaacactatcccaaggctgtgtgcataaagactttcaaacaggagaggatcattaatcatattaactgctattggtgcattattgataaggtgagtaagagaactgagattgacctggcaccaggaaattccccagggaccttggttatgacattgctggtagataatgattatcaaaagaacatgggaagagagcaaatgctgatgactctgaagagttttactacaactgagaagcaagaactattgtgataacagaggaggtgtgaagttaaagagtcaatgatagttagatagatacatagatagatacatagagatggataaatagatattaagaatgtttgacatttgctgatgggaacattatagaggagaaagttggtcatgtaggagaaaagaagttagaaaatattgcttacttttatagaataagcacagctatggtgtaaaaaaaatgagagtaatggctattactgataatcttgatgacttgatattgttacatttttatcacaaatgaaagtcattcaaaccttgtgttgagtgcttgctgctaggcattgtagtaggcactgtttttttagttgcgtctttaaattggttgcttaactagtcttcgtcatagaagaagatataacatatgccagatatagaaaataatttcagttgctagtagagcaacctgacttctctctcaaatcagaaatggcaccaaagaggtagttgtttcctggttggaaatgtgatgtgtgtgtgaggggtatactattgcctgcatacttgcaagctcagtctggagtcttagtgtttgcttgctcctctgtacagtcattagcatagtacatttcttcagaaggagaaagatcctgactgtttcagtaacatgggagactaaaattagaatgtaattattgccaccagagagattttcaaagctctgctaactgactatgtttcctcttgtatgcacatgggcatagatagtactttatgcattggagatggagaaagagatgccatagaaattttacaatacatactgtttcaatgctgacatgaaaacagcaaagtgcactgaaagaccacaaagaatggcttatggttgatttattgtacgtaggaatcttaattccctttgctattgtttatatctttaaataattgtatttaaacatggtctacatctgtgtacatggaagactaataatgtaccataaccatgttgtatatgtgaagtcatatattttagaaatgatttattttcaatcttagcttcttgattctatagcctctaatagtttgatattttcttctctttctcaattttttgagcagggagcttctctcttgttgatgctgaaaagttaccttagtgaagatgtatttcggcatgctgtcattctttacctgcacaatcacagctatgcagctatccaaagtgatgatctctgggacagcttcaatgaggtaagtaacgtggataattcaatccagttatcacatatagaaatggtaccagtgagagttacttaagagagagaagatagagcttagcatgtaagtatttgttatcaaagtcaagaagtgaaagtactgtttgttgttattttaaaaattgtatctggccctggatggtcatattattctgtaccttaatctccacccctagtttgctaagtaaggaaagtttttctcctcagtattaatgaatattacttatttttgatactttctgcaaaaaacttattttgaagtagttaccttttctagtttttctatcttcaattaatgagtctctatgaagccctgtgaatctcttgatttgaggcccctgaaccctctcagtgctgtatcacaaggtggttcccatgcgttccatactgcccttgaggtgtctcttggcttttgttacacttccactttctaacaagcagtgcaaatagatagaagttcctcttcagtgcagtgaatgagcagaacttgcctatgtacatatgttggctgcacaatcctggtagccctataagtttgttattctgatctagattggtagttctttgtgctctgcaagatcatagatatagctggggatctgacaaaagttcatgtcatctgcttcagcaaaaccacatatatgcaaaacatctcacatagtttcagtcttatggatgctcagtcaagaacccttcctttggatctgtctcgtcacccactctaatgggtagtgttttctagtaataacttttcgcccagaagataggacttttttttaaagatttatttatttattatatgtaagtacactgtagctgtcttcagacactcctgaagagggcatcagatctcgttagggatggttgtgagccaccatatggttgctgggatttgaactctggaccttcggaagagcagtcttactcactgagccatctctccagccccaatataggactttcttattgagttctgtttgagagaagaaaataatttttatttcctaacgctagtttctgtattatctcccctccagtcatatgttggcacttcagtcaagagctatcacttatttggttcccatcacatatatcctgacatttggaatatgtgcctgacttcatcactcactgcaaataatgttgttgtcccaccccaacctattttgtaacattattctcagttttttcagcaccatatcaaactatacactagtttcttcttttcagattccgactttaaacgtctcaaattatcttgctttttttcccagccactggacctgaaataaataggttggagccatgagaaagataagattaatacgtcagggaaactggggagcattattttgtactttggtactttaaaccgcatgtagtgcttgaagtggagcctgctgtggcgatgtaacagttcaggttttatgatgatgtaatggcttgaatttacatctatgagtaatccgggaaagtaggctaaatcataaatgtaaccttcccgctttaaagagaccatgtatcaggaaccactttttgatcattgataccagatgtcttcaaggtagagcttcagagggtctaaataacctgtgacattagattttagattttgcaggaaaagtttacatatgtgtgggaaataagatctatgatcaccaaaaagagtttactgttgttctttaagagactcagttaagggagcagagttctttgtacctgttgctaatattatctatcaccctttagctctcctctaaaactgggcacttaaaagatagtgaagtctcagagtaggggataaggaagagtgtagacttgctgcttctcaggactgagttacaatgcttgcatcctagaatactcctcactcattgcatctttgtgaagtagaggtgctgtggcccaaaagttcactttcaccctctttggattctgatgttaaactctacaggttggtagcactgctgcttttcagcctggtgccattcatgctgaaactccctcttacattacaagctagtttgcttaagcagctcctgacttagggcgatgcaaatgtaaactcaactcagtattaattctatgtggtcttcatggaatagattaaggaaagaggaaaaggtacaggcaaagtagactaaaacctttattatactaagtttatctttaagcagaattaattcttcttaatttaataggtcacagacaaaactctagatgtaaagaaaatgatgaaaacctggaccctacagaaaggattcccgttagtgacagtccagaggaaggggactgagcttcttctacaacaggaaagattttttctacgcatgcaaccagaaagtcagccttcagatacaaggtatcatccacttttcttcccagcttgtctgctttctaccttcgggtataagaatttaggtgttttattccatccttctcgtgaaaaccgatgaggtcttccctctctagaaggagcttggaaagtctcagtttccagttactgtctaaagccatgtctacatatcaggaagagagctaacctccagtctttttcttctgcagccacctttggcatattccaatatcctatgtcactgatggaagaaactattcagaatatcgatcagtttcactactggacaagaaatcaggtgtgactatagttaatacctttctgataaaaaattactaatagtgtaattttaaaactttgaacataaggcagataacagattatattttccagtatgtacattctctgatctaatgtcatatatcattgtccatcatttgactacaataaggctgaatctttatatgtataccattggcttttagttgtaagaaataaggttagtaaagtgaacaagtaaaaataaataaataaatttttaaaaaaagttaaagatattttaaagaatattttggcaatgttttatttttaggtcctaggtaaatattttatgttttaaaataagtaaaagagccagagcagttgcttagaatgttactatttactctcgaggtctggcttgcagccagtgcatcttaacaagcactttagagattatttatatgcataataaaggttgattcatgacctaaatttacagtaaatgcttattacaacatatcttgtagacatgtacattctttggtaatgaaaaacgggccaaggaaccatgataacaaggagataataaatcatgacaatgatccaggctgagcaaccctacatgagcgtcatcatagcattcagaatagttcagagtttttagatcatttaggtttcagatttccagattaggaagttctgttagtaaaatttgtacaaatggtcgaaaatctacaatgttccaaatttgaaacacttgtgaaatacatctatgatacctacatcccaaaagaacataaggctcttggattatgtgagaatcagcaatgaaatccttagatttatgaaaaagggaaagttcttgcttagatttggatttgttttcaaatctacattttgatgggtgaataaagcccagttgtctggttcacaccatggctctcccatttccatttaactagattctagatgaggtatttggcctctctgagcctactataaaatagggctgcgataaggattcttagagtttatttatataaagtacctaaaacaatgtctggcacgtattaagatcatgttagacactgttactaatgtccttataaagaacctttaagcataagctatgtaggtagtcttaatgctgccatcagttcactagtgcttcttatcattttacaattttctatttgaaatcattatgtacttatgattttcatatcttgccttttaaaaatatatggtaaaaatatgataattggcatagtcctttatttttctatgcccatgattcatcaattgtctttattaaaataaaaatattagatgatgcgatttcttttcctattaaatgatttttttttcaatctatgcttctcagaattgtagactgttaggtttgtgatcaggtacttgacactaagttgctcttccgtgtaggaagatggcagctgccagctgcagcgagggtgccatttccttgcagcttctccacacactgcagcagagcacactgccaacacagcactcgcactgtgtatagtgctgggggcagataaggatcccaccatgtccttgattaaagtgtgaaaaagtgttgccttccctgctgaaacagaactctaaacattaggagttcctaaaatggtgctctgacccaaagaagaggagtaactccctactgggcatatatcagtgtagtctaaatgcaatgcagcatttaaaaggggccagtaaagaaatttgcaaacttcaaaatagtatttaattttttgttggtattagaaataggcaataagaaatctgcttctgtcggctctttaaaaagctctgtttatatgtgcatgtggtaaactgttcttgagattcacgctgtataaaatagctacattttcctacttattccttaccatagtcaagtcttagttgctataacagaataacaaacataatttaaagggaagaaagatttattttagctcacaatttgacaggttcctggcatctgggagaagagaagaaaaaaaaattggcagattatacctgtctggagacattccagagtagtaactctcttcctccagaccctccctcccaagtgcccattccctaccaacttatcagtgagataagcagttccttgtcagggataaataagatcctctagcttgggactaagctttcaacaaatgaatgtagagagacctgtatgtgtgaaccattgcctgccttcctccctcccccactatgcattctcttttcctgcttttctccccgtctccacacttcccccatcccctctctcctgctttgcctctcttcctttgcttctccctccatccattccccttccctccctctttccccctcctgctccttcccctcctttattccctcccctcctctattccctccttctccccctccctttcttctttgtgtccctctcccactctgtctccttctactcccctccgcatctctcttacctgtttttgctgcaccgaatattttccagcacctcaaacaggccatatttgtgtctaaactcgtctgtgtgctatgctttctccttgaagaacaccctgacttcccactcccttgacttcctccttttcattcttcagcccttagctaagccaaggctcattcctcaaagacctctgcatcccaagaaaagatagatttctagtttatagtttcaaataacagtatgtactttctactcagaatattctgtaaatactgtctacttgtgtctctacccatgttatatttatctccccttgagggtaaatattgtggtttataaatcacatgcaattggtaaattcacattggtgaatactactcaccttagtagtaagtgcataaagaattaatgaatgaataaatgaaatcattgaattataatgttgactataaaaactttcaagaaagaacatttaaagccaaatgaaatgtcttatttttcttcattggtaaaactcatagtaaaagggaatatacaaaaaggaatataattgttgaatatgcagctggaactggcctaatttgacataattgtcactaatagttcccttgtgactgttgctgctttaatttctgccagttcagattttgagtacacattgaaaacattctactcttataaggaaatgcttgaccctaaggatcctagaatctttttggcccctgacaccccaatagtaattactctcaacttagttgcagtttctttttctatcctcagaatgtagtagagaataattatggcactataagatcctctggtctctgaggtgtacaggaaggctctgagcttggtttactggttcagtcacgtgcaataaagtccatttagcatctctgtcaccttttcccatacacgttgtttttgagtaattgttacacaaaataacaagctagagagggtcatattttaggttatgctaaaaaatttttactttgtccttcatttctgttatctacattttatatatatttttaaacccaaaatatttaactacgcgatatttaattctaactggaaattgtatgtttctggaaaagtatgtcaccattcgagaaatatttctatgaaactagaagatgtatcattggaaggaaaaacaattagaaagaaaaaaaagggaggtggtttactgccatacttttatgtgctgttatctttgttcctacataataggataaagaggaaaggaagtgaaacaaagaaggctgggcttttgctagggctaagctgtataggattctaatccgctggacgtcatagttcctaattttatagtaagaacatgtatttttatttctttgtttcagaactccaatatttcttcataaaacagtatttgattttcatagcttatagacaaatggtttttaaaatcacaattagattactttgtcagaaataatggggttttgccatttaaaattaaattgctcaaactttattattttactttacaataaactatgaaaaccaaactgttaatgtgttatgattataataaatttaaaacttataaaagtagtctcatatacatttgagctagcaaccagtttcatccttatatataaagcaattatttgttcatacctatggttttgatgtcctagttcatactatatatgataaacttactatctcctgctgttggctatgttgctaatattctggcaacttgataacagtcacaatttgaaatatactctctgctgtatttcttctctctcttatctggagttggtcaggtttgcagaatagtccttgctcatcagtgaaaatattcattattccaccattcatgaccccatccactgaaatggaggccatgcttagcattccttttgaggtcagtggagatggggctgtgtaatacctctttcctgggctttatctttaaaagcaccatacaagattatacttgctaacccaaatattgctcctttttggattagctaatgatataattattctcatcagttagaagcctatttgcagtggcctaacctgcaaccatgactttttccttcactaataattcccagaactacatattaccctgaaaaaaagagtaatgtgaatttatttcacctaattgatactttccatctattactatgtcaagaataaaaaagaaataaatattgaatcttttaattaaaaggactggtagttctattaggacataattagaagtatttccatcttcagaacatctacaatatcagcaaaattagtaataaaaggagtcatcagataaagtctaataatttatgcttttgaacttgataaactgtaagtaaaacttcaagcactaacctatctttcatgttaaaatgtgtttctaaagcaatttgtatgaaaataattcactatataagtattatgataaggaaaaaatttaaatgtttcaaaacaggaaatggactaaagtggggcaagtcctgaaatgaaaagttggctatttgggcattgcttctgaggacaatggaaatgaaggggtgggaaggttaaaggtgaaaatgcaggatgaacatcaacacatggaagataactgtaggaaatatgccattaattcaaacaagcatgacagtaaatatatactacattatcattgggtttagatgagtttttttatataattaaaaaatgtatatttttactttaagatcagaagataatatatcattcatattttaatgtggtttgaagttatttgttatgaccttagtcattatatattcattcatttgataaggatttgtaatctcctgctaggtgcctcactgtattgactgagaagttaatagtgaaggatcagtacatagggcttgtagcaaatctttacctcaggtctttccaagcatgactctcctgctgcatctacatccttgtcaacttttaggaacactcttattagtaagtttagtgtttagtaacataattattcataattttaagcatgttgaaaattcatcagtatattttgtagtcagttccttgtttatacattctctttgccaaaatcataggcatttttaacaattctcttagcacacacatacgtgtatacatatgcatatatacatatacatacatacatacatacatacatacgtacacatatatatgtgtgtgtattaaaaaatacatgccactattctgttattttaactcaactatttatcttgtgcctaacaaaaccttaatttttttctaatgtttattttgatagctttgaattattttctaaataattttttaatagtataataaaagacaaaggttgagatgggacatactttgcataatgtacccactgttttagctgctgtcccgctctgcacaccatcccttttccctcatgcataatttcttaagccttgtgttttctgaagtcacttaaaagaatgacatcttagccatttcttccttcacaaagcctctccagactgcccttcagagtgaaatagttctgtttgcttccatgaatgttgtattttctttttctaccagtggcactatgtgatgttgtatctaggtgcttttattagaccataaaaacagacccctctgtcttctttgtcatttgttctccagtgcctaatcctagagctagtaatgtatgatgaataaataatgtttgaatgagtagcaaccttcattaatgtgaaacgtacaataccagcacataactacttagtttcttagaagaatcatagatatgaaaacatactttgttaactttgaaaaaaaaaagccctctattttctactctcctggtgttttactttttcttctctttcagatgtcatcaatcttacagaacaagtgcagtgggtcaaagtcaattcaaacatgactggctattacattgttcactatgctcatgatgactggacagctctaatcaatcagttaaaaagaaacccttatgttctgagtgacaaagaccgagccaacctgatcaataacatctttgaacttgcagggtagagtatgcttgatttgcattgtggttgtcatgtttttaaatgttattgcagtaagaaacaagtcagagaacaggttgaaagaacaagtagagttttagaagatttggaaaatattaaacatgttcattgctttcagagattttataatgagttagaaacatcagctataaacacattgaatagatagcataaaacaggacccactatgttcaagaatagataccaacaagtagaatacatattttgttcagtaaaactgttataagaattcaagcttcacattactttatgaatgaattctcttcatgaagaaattggcttctgcctaaagcttagtgctaacctgttagttgagtagcatctctagtgactggaccctccttatacatgtgtgggttaccatatacattatagaagcccaaagccaagaaatggcagtggtcttttttttttttttttttttttcttcagcagggtttctctgtataccctggccttcctggaactcattctgtagaccaggctggcctcgaactcagaaatccgcctgtctctgcctcccaagtgctgggattaaaggcatgtgccaccaccgcccggctggcagtggtcttttgtagaagtgttttctgaagagcttacaattttagattgactccagacctagaaacacaaagaatactaatcattattactttccaaattttgactgtgttttaaatatgaagtagccttgttatgtccattcaaccattactgctatgacttttacaaactacctagtttagttagttagttagtttatttgtttgagacagggtgtcattgtgtagccttggctggcttggaactgcatcaactggcttcagattcagagacccacttctctttctcttcagtgttgggattaaagacatgtatcaccctactcagcctaacagcttagtattcactgtaaactcacaatagactttataaataaatagagtttacagtttacaatttggcaaactgagtttacagcaagaaataagatttgtctgttttctgatttaggtattccaaatcagtcactatttagatagaggtatgctatccccaatcttgtggtagatagaaataattagtaaataaaattaatagcagtcatcgtttccaagacagtgtaatgcttctacttagtccatgccaaataatagatgacttttggatcaaaaaatgagctgttgtgtatctttctattaaaatgcatcattacctgtgagccacttaaatatatttacttgaatatagcattgtctgatgctactgtaaacctaagtttctggtctacagatgtaaatactcactataaagttttcctccgtgaagttatgtgtgtctcagtagatttatacttcatattcatttattctatagtcttggcaaagtgcctcttcggatggcatttgatttgattgactatcttaaaaatgagacccacactgcaccgatcactgaagccctgttccagacaaaccttatctataatctcctagaaaaactggggcacatggacctgtcctcaagattggtggtaagtcttccttccttcagtttctcttacagcctacctttaatactgttagtcacaattctgttcagcttttaacatttcttcctttaaaaaagcagttaaattcctttttttttttttattttgctggtttaaaatatctattctggatcagaatgccattgtttatcatgaaaagttggtgaaacttttacatgaaaatagtgttctttcaatatcaaaatatagacatttgtctgctgttaaatagagccatctaaaaagaaaatgtccttgaagtccctcttgtttttacccaacattaaaacagagtcatttaaaaaggagagatcctattaatttgctagtggtcattataaaatgtagagtgtttgtcctgaagataccctgcctggtagttgttgctgactactctgcagggtagcgatgctgttaggtagcagtgactgtaggagctgagtattagacctccgccctcttaaaaccagtcactcaatcgtaacagctattacttttgacacttcaacaattaaggtaatataatagttacctaggattgcttaatgtgttgctacaaacttgttgtacaaaagtaccagaaactttattatgcccctggaggctagaaggctagagtcacggcgttggcagcataatcttataaggaataatctactgcctggattttccttagtttcaggtaaatgctagtaagccttgtcattccttccttaaattcatgtcacttgacaaggcactatactgtctgtgtttctgtgcccaaatttgccagttgtcatcgttatatcaacctctagtttagagctcatagtaaccctgtataacttcattttcgcttgattatatctacagagacagtgcccaattaaggttatatgaatcggggggaagtacactgttcaatgtagtatcagtagtagcagacaacactaatacacatcactcatttttatcactcttgaaggacactgatttgaagggctttaaaaatacactaaaggaaggcagaatgtctgcctgttctaaggctggctagctagttagcttcatggaagcagaagcccttcttccatgtgtctttctctgctctagttgagattagtcttagggagcatttggtaagtatctcaagttatcctttggttgaaatcacaaattgggtctttggagtattttcctgttggtgttcaagtaacccatctcctgctgcgttgcgtcttcgtcctccgtggtttcaggtttgtgtttggaatgtacaatagagtagatccaagggactggtgagtaagtgcggagttaggaggcttagtatctatttctaaggcttggtccctttagtgctataactccttacattttttgttaaataccttcttggctgtgggatggtaaaccatgcccagaaactcggtgaatgcacacctgagacggtaggtgcctcaccgctccctgccagattcctggcctagaaaaaaaaaattcttgacctggaactcgtgctgcacttcccacataaatgcgactgggatgtctaaaggccctgagagtttagccaatgagttctccttccccaacattgcttcctgcaaaaggtatttaatcttgggtccaccctgtgaagttggtatagtgtgcatccattatttcccacagtacaaagtttggaaccaaggcctatctctcatccagaagcaccaaggggagcatggagaaggcctctctgcctcccagccacagtcccggccaagctgcagctcccgttccccctggccccaggctagtctctatcctaagcccaactcctaagctctcaactcctacgacccagtggtgcctgaatgtcccggagcttgagagtgcccatcccagccttatcactagcctgtggacccctgacacttcattcccaacgtttctgtgtgggacttatctgtgtgttttctttcttttttttaaattggatattttcttcatttatattttaaatgctatccccaaagccccctatgccctcccccaaaccctgctctccaacccacccactcctgcttcctggccctggcattccccttactggggcatatgatcttcgaaataccaagggcctctcctcccattgatggccgactaggccatcctctactacatatgcagctagagatgcagctctagggggtactggttagttcatatcgttgttcctcttatagagttgcagacccctttagctccttgggtactttctctagctccttcattaggggccctgtgtgcttttctagctgcaactagatgcctagaagttagggaatacctgcttcagctttcttacatctcatgcgcgcgcgcgcgcgcgcacacacacacacacacacacacacacacacacacacacacatacacacacacacacaccccgtaacagtgtcttgacagtttcctgaagctcagctcctgccccgctgtggcattgggataagtgccgtaaagctccccaccacttgtctcctcagcagctgggcagagtggaacacgggcccacacttggctttaattcataaagagaaaaatattaaaatccttcttttaatcttaggggattttgatagcatcaaaactatcaaactgtgaaaccacttaggaagtagaatgacatttctaagcctttgaatccaatattgaagtatattagtatttaatattggtgcgtgattaatatttttatcattataacaaaaaccattcattttgttatgaaaactatgcgtaatgtatacattgttttgtgaaatatgccatggtttggtgggtagagtctggaggtgtattggaatgtgttaaattgtgtatatccggttaatgtctgattttagccatattcctgttttataacttacaagtctattattcttttacatatgaagcattggttggataaacctttgcaataaaactgacagttttcttttaagaaactttgctaacttaggaaagagctttcctgagtgtattggtgtaaaattaaagcagtatatcaaaatgtaatatatagcaaagcgtcaggatcttttcctattttgtttttaaaataagtttgttgctgttgctacattttattgtacatacagtgcacatctctttatgccctttctcttcttgccattctgtataaaattagtgttagttgtttaattttcttaacttcaaaagaggtcaatttagaaaccatatgaaaagtgtatttcattttattttataagaggaaaaggcaacttgaggcacctgctatgctcttattaatataaataatattgaagacggggagccgggctggaggatggtataggggtctttggggatagcatttgaaatgtaaatgaagaaaatatctaataaaaaatttaaaaaatgaaaaaatgaaaaagaaatattgaagacaatctgaatcatctatttaaatggtcacatttaaaacagcaggatttttatgaaaatagaattatctttgtaaaatatgtatcatgctttcaaatatacttaacatattttgagattctctcttaatcatttggcattaaggacactagcaaaaccatgccctctgattgtagggtctgagtgctcagagctcagtctaatcatcttcccatgtcaggctttctctgctccagtgtgtcgcagtgccattttccttggggttgctgtggctctcctctgagaattttgaaaataggattccaagctgtaactttcccatactctgttgctttgttttttattataagtacctttaattttttttcaactctccattcatttgggacaaaaacatcaggcttagggtctatgtctacaattaaggatagtgctattttgatgatattaaatgggtcagtcagttgcagatagcaggtaccagcacagccaatgtcctgcaaaagacagctagcatggcgaatatgttttgattccacatttacccagtagctctcaagctccaccacctcatacattcaacatggtgtctggtctttatcttattgcctttaaacaaacagaggcaagttgatgtgttatcacaaactttgagagcttcttatactagttcttttttggttttagggatggacagtgagttttaagaagagcacagtacttcaaaagaacttaaattgtaaacctttggagtttgaaggggtttctcataacccatctgtgatgcttgattattagggtaaagtagtgtcttagttaggctttgtgctgctgcgatgaaacaccacagccaagagcaacttggggagaaaaggctttttcatgtacactttcaggtaataggctgtcattgagaaaaatcagaaactcaaatagtgcaagaacctggaagcagaagccatggagtgttgcttactggcttgctcctcctggcttgctcagcctgttttcttatagcacacagaaccagtcagctacccacaatgagctgggccctcccttatcactaattaagaaatgccctaccagcctgcctacagccagatcttacagagacagtttctcatttgagggtccctccttttagatgactagagcttgtgtcaagttgacataaaagtagccagcatgggtgagtaaagaagtaactgttgaggagaaactggctggtgctgagatcccgcacaggggcacctgtagggtttttggttttttgttttttaatttaacccatcttgtgtatagcttaaagaattccttacagaaaaaaaaaatagcattttatatcagagcttttttcccattgggatttcctgagtacatacttcttacagtattgttaaattctgtgtatcttctccctccctggtgcataataacttgtaacatggaggacttccacatactatgaatagcttttatgtttcttcagaggaaacaatgaaaaggggattgccaattctatactacatctatatcacaatgtcctttcattcagaaataactgtgacaatgcattggttagaacagcaggtgatagtgttgaataattgtccattttctggagtataacagggtgttttgatcatatacagactaggaatatacaaataaaatttcatggtctggtgagatggctcaatgggtaagagcactgactgctcttccaaaggtcctgagttcaaatcctagcaaccacatggtggctgacaaccacccgtaatgagatctgacgccttctggtgcatctgaagtaagctatagtgtacttaagtataataataaataaatctttgggctggagtgagcagggttgaccggagtgagcagaggtcctaaaaattcccaacaaccacatgaaggctcacaaccatctgtacagctacagtgtactcatataacataaaataaataaataaatctttaaaaaaacaaatgaaatttcataatgtctataatttacaaacaatttagctaaaataaaaaagtatatatgttttacgtgcataaaaatgaagcattagaaactgataaatctaggtaaataacatggatgtatactatatatctatttgcattttgtagctttgacttttttatatttggaataagtaaactatactgttccctatggatgccattttctctttaattttgttaggttaatttgctaatgacctaaaattaggtggtatgtttaatatacttttaataatggatttagaactatttaaacattaaatcattggtaaagaagcatattttatcaaaaggcgataacatgtgcctataatgtcagcaagagaattgtatattcaaggccagcctgagctgtataattaaatcaggggatgggggaaactccttctgagttaagctatatcattctaagtccttcttgtagctatattattggataatttcattccagttaaatttgggctttatgtgtaatttaacatttagtaagtaatatgtatgtcttttttccttattggagaaaagatatgtagtagtcctaatttcctggttgattacattattatcaataccattttaatcaattatatttcatgtctgtaggccagagtacataaattgctccagaaccaaatccagcagcagacttggacagatgaaggcacaccatccatgcgagagcttcggtcagccttgctggaatttgcctgtgcccacagcctagagaactgtaccactatggccacaaatctgtttgacagttggatggcatcaaatggaactcagaggtgaaatgcacatctgcttgaatgggtcttcccattacttcctaaagaaggaatgatatcccactgtattcacttgccctatttaatagattttttttcatgacctttgaattgcttctacttcttgtaaatagtactgccatgaatttaaacataaaattgttagctcttgtagatctgatttaaattcttttgatatatatctgaaagtgatattgctggattatagagaatttaatatttgttttaccatatatctatatatgtgattgtataagttcacatgtgtatggatactagaaaacaatttctaatgtcagtcctcagaaacaatggctttcattggcctgatgctcactaaatagtcttaagagtggctggttagagcccctgggatttgcctgtttctgtctcctgaatgttggtatgcataccacctccttgactttattatgtgggttctggagatcagactcaagtactcatgctttcttggcaagctctttatgattgaactattttccctagcattctatttttaatttttagtttttaaagaactttcatgatatcatgtttctcaaagtaattgtgtgattttatttccaccaacagagaagcattccagttttttaacatccttgccaaacacatgttttctggttttgtcttgtggatttagtttggagatggggtctgtgtaaccctgcttggcctatctctgcctcctgagtgctgacgttaaaacaagcacactcatgcttggcctagttttctgctttggttgtttgtatttaaaactcttcgcacctgtggtgctgaggatctaacttagggtctcatacttgctggacaaggactctaccactggcctctatccaccctccccatacccagctctgttgtatacatgggactgggtgggtagttgttgagctctgatccgcatgcttgtgtggcaagtactttaaatgatggagctaaaaactccatgatcccaactttttgagtttttgatatgagatatttctcaaagggtgagagaggtctcctttagtttagatatggaacgactggtgaagtgagcatttaggagaaatgctcttgaatgtaattaattctttccaggctttaattctttattgagaatattgaagcaatgattaaaatatcatttggaaagttgagatgggacattttaataaaggtctgaaaactttcctagctctgagaccttaataaaggcagttggctatgtttcatccccttcttacaccctgcctcccaaatttgcatttattgatttatcccgtgaaacttaccatcattgaattaactctagattgtatgaaatttacagttattatttaatctgaaccagtcaactcctcgcctttgtagtcagatgcttgtccttgttgttctcatgcttcattacctctcttacagcctgcctactgatgtcatggtcactgtgttcaaggtgggagcgagaaccgagaaaggctggttgttcctctttagcatgtattcctccatgggctctgaagcagaaaagaataaaattcttgaagctcttgccagctcagaggatgtacataaactttactggtatggaaccactcaaagaacatgatagaaagaaaccaaaaataaaagtactttgctgtttagagcaggaggccattttctcttaagttctacctctgacagcctcctgacttggacattaggtgaggagtttccatgagctggacttcctcttgggactgaaccttaacagatatacagaatacacttggtttgagagatgtgaagacgtcagaaatgacaaactccttgtgtgccctgctgggaaatgccctcccttggcatgatgttctaaactccgctaggactagacagtgacctgttctgtcactttgaaaatacaaacaattcagaaaaatatctaactatacaactatagaagtgtgtatagtctacttttctatgaatttattgcttatacatcttaatgtccaactacatggcctagaaacaggagctacttgtgggtggaaaaaggcagtaagacctaacagagaataggatgaggcagagtaaaggttcaagtgaccagaagaaattcaaaggtgcatgcaacttaggacactgaaaaacatacagagggtagagggaacatcttaacctgttgtttctgtaagataaatttgctcagctaaatcctaacagtctcccagagatgtccttgggcctccccagacccactttgttttttcttttctttttttttttaaagatttattttatttaatatatgtaagtacactgtagctatcttcagacaccagaagggggaatcaggtcttgttacagatggttgtgagccaccatgtggttgctgggatttgaactcaggacctccagaagagcagtcagtgctcttaacccctgagccatctctccagcccccagacccactttctaaatgatagttgataaataagcattacctttttgtttttctttattttttctgccccatcctgccctaccttatctcccacccactcccctccttccatctgactccgatgcctatttttcccccaccctgagtaagactcacccattctcccatgggcctcactggttatttagcttctttgagtacgtggattgtagcatggttatcctgtactttatggctaatatttacttataagtgagtgcacacaccatgcctgtctttatgagtctgggttacctcactcaggatatttctacttccatccatttgcctgaaaatttcatgatgccattgtttttaatagcttagtagtagttcattgtataaatgtaccacattttctgtatccattcttccattgagggacatctacgttgtttccagcttctgtctactacaaatgaatctgctctgaacatagttgagcaagtgtctttgctatatgttggaatatcttttgtatatgcccaggagtggtatagctgggtcctgaggaagaactattcccaattttctgaaaaaaaaaaaaatgccaaattgatttccagagtggttgtataagtttacactcccaccagcaatggaggagtgttccccttgcttcacacccttgctgccatgtgctgtcactgaggttttgatcttagccattctgacgtatgtaagatggaatctcagagccattttgatttgcatttccctaatgactaagaatgttgaacatttctttaagagcttctcaatctttagagatgcttctgttgagatttctctgtttagctttgtactccatttttcatcagagtatttggtttgttagtatctaatttcttgagttctttatatattttggaaattagtactctgtcagaggtagggttggtgaagatctttttctgttgtgtaggctactgttttgtcgtattgatgttgtccattttcttatagaagcatttcagtgtcattaggcctcatctattaatcattgatcttagtgcctgagctattagggttctgtttgagaatttgtctcctgtgctgatatgttcaaggcagctccccgctttctcttctatttggtttagtgtgtctggtcttctgttgaagtctttgatctacttggacttgagttttgtgtagggtgatacatgtgggtctgtttgcatccttctatataacagaaatctagctagatcagcaccatttgtgttttgaaagatgctttcttttttccattgtatggttttgacttctttgtcaaaactaaagtgtccataagtatgtgggtatattggggatctttgattctattctattgatcaacctgtttgttttttatgccaataccatgtggtttttattactattgctcagtagtacagcttgaaatcagggatggtgataccttcagaagttctctcattgtatagcgttatttcaggtatccttagttttttggttttccatataaagttgagaattgttcttttcaggtctgtaaagaatgtgctggaattttgatggggattgcattgaatctgtagattgcttttggcaagatggccatttttactgttaatcctaccaatccatgagcatgggagatctaataccttcttcagtttctttcttcaggaacttgaagttcttgtcatacaggtctttcacttgcttggtagagttaccttttatataatttatggctattgtgaagagtattgtttccctaatttctttctcagccctattcttattcatataaaggagggctactgaatttttttttcctttgagttaattttgtatccagtcactttgctgaaggtgtttatctgctgaagttctctggttgaatttttggggtcacttatatatactatcatatcatctgccaatagggatactttgacttcttccttttcaatttgtatccccttccttcagttgtcttactgctctagctataacttcaagtactagattgaatagatatggagacagtgggcagccttgtcttgtccttgattttagtggaattgctctaagtttctctccatttaatttgatgttggatattggcttgctgttattgcctttattgtttttagatgtgtaccttatattcctgatctctccaagactttaacatgaaggggtattagattttgtcacagaatttttaacatctaatgaaataatcatgtgcttctttcagttcatttatgtggtcgattacattgattgattttcatgtgttaaatcatcgctgtatctctggaatgaagcctacttgatcatggtgaatagtttttggtgtgttcttggatttagtttgagagtattttatcgagtatttttgcatcaatgtccacaagggaaattggactgtaatttttgagtctttgtgaggtttcggtttcaggaactggcttcattgaattaatttggtaatgttgcttttgtttctattttgtgaactaatttgaagagtattggtattaattctcctttgaaagtctttagaattctgtgttaaaactgcctggcctgagctgactgcttctatttccataaggattatcattttacttaaattgtaagtatctgatcttgatttaactttggtaagaataatcaagaaaatcaatcattttgcttagacttttcaattttgtggagtacagacttttgaggtaaggcctaatgattctttggatttcctcagtgtctgttgtcatgtccccctttacatttccgattttgttaatttagatactgtctcactgcctttaagtaagtttagctaaggatttgtctatgttgttgatttcttaaagaaccagctcgttgttttattgattctttgcattgttctcttagtttctaattgattgatttcagtcccgagtttgattatgagagagaaactgaggctgtgtgtgtgtgggcacacactcatgcacgtatatgtgcatttttgtttttttcctgatgtgggattatctatatcctatgttttcttgggtgtagttcgcctccttggtttggagttttccttctagtatcttctgtggagttgtttttgtagatagatagtgtttaaatttgcttttgttatgagacatcttgttttatttatctatggtgattgaaagtttcgttggatatagaagtctgcgctctatctgtggtctcttagaatctggcttttagaatttctgttgagaagtcaggtttaattctgaatagatatacctttgtatgttacttggctttttccccccttgcagtttttaatattctttcattattttgtacatttagtgttttaattattatgtggtaggaggattttcatttctggtccaatctatttggtgttctgtaagtttcttgtatgtttataggcctattgatctctaggttgaggaattttttttctatgattttgttaaaaatattttctgggcctcggagctgggcctcctcaccttcttctatttctactattcttaggttaggtctttttatagtatctcagatttcctggatgttttgtgtcatgaactttttagaatttaacactttctttgactgatgtgtcagtttcttctacagtatcttctaagcctgagattctctcttccatcccttatattctgttggtgatgcttacatctgtagtttctgttctcttcccttgggttttccatttccaggattccctcagtttgtgttttctttattacttctgtttccatttttcaggtcttgaacagtttttcctgtccttaacctgtttgattctattttcctgtatttctttaagggatgtatttatttaaggtcatcttcttgtgctttgctgtagtatagtaagatagctgggctctggtgttgccatattgctctggctcttactgattgtgttattacctggcctttagccatctgtactgggtagatagtcctgattccagcaagacttctctaggagacatgcagagctgtaggacagtgcagctcagggaatagcatgatgctcacctctgctggctgttcccccaggtggacctggcaggcagggataggtgaggagggatctaacctggatgttcctggaactcagtaggcctcttcagaaagccaggcagagccatgacctgatagtggtcagtgtacagcatgaaactcacctctaataagcattatctttaaagcagtggctagcctttgaccttagcacaatatactataacttttcattataaatatacagtacctaaacatagaaagtaaaatgagaagaaaattttagaacccttaactttgtcctaattttatttgttttttagtagaattactactggtctatgtgtttgtgtccagtaggctgagtattcctgacctgaaaaaaaaaaaaaaaaaaaaaaaaaacagaaaatgttctcaaaaaattgtagtaagttgcagtttttcctttgtgtatcataaatcattatgtgccaaaacatgaatatgtatatcatgactagtaaaataatcaaataagttttcactgtatactaagcctagtccaacctgatttaccttgaatggataaaaaaaaaaaggctcatattggaacccaatgctattctaactttgatcatcatttcaaacacaattattttgaagactaaatctgttttcttcttcaggttaatgaaaagtagccttgatggtgacatcatccgaacacagaagttgtcacttatcattagaacagtgggcagacattttcctggacacttgctggcttgggattttgttaaagaaaactggaataagcttgtacataagtaagtttcttggggaatgactgactttcatgttcttgggctgtgcatttgcaaaatgctcttagtgccttgctgcctccttggggttaaatggtgaagaacttcttatgtagcagctttctatttgatatctgtatttataagcatcacatcacttagcagtggtgttccattgaaatgctaatcaaggtcaggtatacctcataagcttgtcatcctaacctggccatggactatttcagaatgtttgtctagttatatgttcaaaatatttcttgattgccaaagcatcagctaggtagcacatatagtattttcttcttctcttaaagcaatagtgatttttctgggtgtaggtaatttttgagaaccaaattaaaattctatcagaatatccaagtccctacctcctttcctgcccagcatcagtgtgtaaagatgccccaacttctgggctgcatttccatgaggaagacgctactctgcctgtgcattaaagtatttccttcatattcttgaacagtgctttgggtgtcagctgcagcttcattgctttctcttatatttgtgtttcttcaggttccatctgggctcctataccatacaaagtattgttgctggatctactcacttattttcaacaaagacacatttatctgaggttggttgtacaaaatgctagcaggaaaaatgcaaggctcctctgttgaagtgacgtggaggcttttcgtgctaattctagtccctctgtcttctttcaccaattctaatgattccacactgagattatttttaagtgattgcatgtatagcaaggagatgaaattctaattccattctcagcactacttggtgtttcctcaatacaaataatttaagtaggaataaaattattttgaggaatctcattcaaaaatgtggatttatttatcaagcctaatgttgacttttccttcggagttctttttctattttaagaaataataaggaaagaagacatatagacatagtagtagaggcacgagcagggaaggaaagggtcctttgtttttaagatcacttcagatattgtcacacttggttgaggcaaataccttgggtgttaaagtatcgggctgttcctgaatgttaccatactccccctacttcccaggtgtcagacctttgagccaccatcacacagttaaaacttatttccaatggccaatcagggagcctcagcctttctttgtttaaaatacttctctgtggaatttgcaggtccaggcattctttgaaaatcagtcagaggcaaccttgaagcttcggtgtgttcaggaggctttggaagtgattcagctgaatatccagtggatggtcaggaatctgaaaacgctctcccagtggctgtagcactcacagctgatctccggcgcccatggctctgctgctttcgcaaaggttgagtgaaggccggcctgctgctgagttgtttgcactgttaggagttctagttagctcagggcccaattgtatttttcatatcttttctgaaatgtctttaggcagtagttatttattacaaaattatattcacctgtatgtcatccatctacaataacaatgaataacttttctttgacacacaaatggagaaaaaagtcagatttgaaattttgttttatttcttagtgtccagagtattactgttacagtgcaaccaaggaaggtctgctgtaagaaccactgtgtttgtaggttgctgattgatcaactgtttgttgctttttgttaaatagatacacctgggtttggtagtgcagtggcaaagacattgaaggtacagctctagacagatgacctgattgggggttctttaaaaaaaagttttgtccagtttccagttttttcctgcaaaatagccaggttctaaagactttttcatatttctgttaaattgaacagctgaacagtcaggctcaaagtttcagttttccaaatatttaacactttctgcttcatcttcatgacactatgtaggaagtgttctgaactgagttaacattaattacgttactcatgaattccagtacccctaactttgtatcctggtaaggccttccaccagctttctcctgtagaggagcactccatgcttgggaggatttctcctgtagaggagcactccatgccatgcttgggaggatttctgtgagcgctggtggctttgtcattactttcacccaagaatgtaatttgtttaagttgctgtttgaaccttacaaatcataccctcttctctgtgaatcatacccatgtgtgggttttactttatgttacagagtatattagaagcatttcttaaataggatcttcaagaaattaaagctttttattttgaagttcaccataataccttaaaggaataatgagaatgtggagcaggaggaagttgaaaatatggtgggctatgaattctttttttcactgttaaaaacagtgtttttatttagttgaaaaaattacaggttttttgtttgtttgtttgtttatcatggccaaactacgttaaacagagtggccaagaatcaagcagaggacaagggagggagggaacccagagcagaatgtgggcgctttcactccttctgaaggagaaggtttgtacttgaactttttgagctatgcagacttattcctagattgttgtgtttctttgaatcttaggagagaagctttcttcttaataactcatgagaagtctatattttgtttgaaaacagtgtctgtgtacataaaaagggaatcactcatttctgaacactgaaaacactccacagagtcagaccatagagaggccacttgtttttattcagctgttgtaaagttagaatatgtggagttatatacaaagttatagtttattttatgagaatatttttatataataaaattttaatggctgacaagctgaaaatagcctgctttaatcctagagtttgctcccaatttcatcttttctaaacagtttttgggtttttgtttgtttgtttgttttttaatttgtgctttttttagtagaaactgttattcctgagaatcatagaatcatctttctattttagtgaaataggtaattatagatctctattccccttgtacttttggtaaatgtctgacagttgtgttgatactgaaggttagtagggttttatatttttagagtgaaggacaaatactcttgtgggttttggttgtcccttttcattttttaccatgctgtattactagattatactttgataacagagtttaacttttgctacttctcaagatcagttcaaccttgagatttacctgcccatctttttgttgatcttatagtctttgtaattctgcatatggcaaatcttgtcctaaataatactttttttccatgtatgagtgtgaatatttgtggtgtgctgtgttgtagataaagccttatgaggatatgggcttaaggagaggtaatccttgatccagtgcgattagtagctgctcgttcccaggatgctggagccatattttaagtcttacctataaccttcacctgactttttaaaaaattttggtaggcctcttaatttgcccccagaattctgtacgttttcatgctttgttagctcgtttatgtacagcttcttagctaactcaaagtcagttctgtatgactgagaggtggcacttgtagtctaagaagtatgttggtagcattcaaatttccttcctctaagatttaattcttctctctgtacttttaggaaggaaaattgaagcacgggggggtcagcttgtgctttgggcataaacacacaaaatgcctgacagctttgggtagcagttgaatgagcattctgatcactacagagaaggggtgttcttgaatgcaatgtgaaaggtacgtcttgattaggaaaagtagaattggaattctagacttgagaaaaagaatcgattgggagatctgagagtttattaaagctgggaattggaggagacaagtttcctctgctaatatgacattagatataataaagtagtggtcatgcccccaccccagaggctcatgctctcttctgtctcattgtattagtcattgtttcagagtgttcaaagactttcttgctatcataggttctacttaattttctttgccatatgtgtttttatttttatgagattttagccaccattggagcaaaagctgccagaagagtcctgggtataaacaaacaaatccagctgcatgaggtttactgggtacccaacaattcttgctgattattgcgaagcaagaaactaaaattaagtcctgtgttgttgcatgattgttagtctgttgttaaattggattgtaaagatggttacttaatctaaagaacctgaactgatgatcttcagccagactgctgagcacttatagagaccatgtgttgtgtgggctctaggatagcatggtctgtctcaggtgctctgttgccaaggagtgcaatgagtttgcatctaggaatgcgttgctttacatagcctctaaggattgggaccatgggtataatgtaggtcttcttacctttgccttacttttgtttatgtggaattaaatcttcttctacttcttcttcttcttcttcttcttcttcttcttcttcttcttcttcttcttcttcttcttttttggtaatgttctgtcttctcatgtttgtatttcttgaaactcaggtatatatttttgctggggtttttgttcttttattttgttcttaaagctctaaaatatcaaaaaagtttcaaatgaaaaatggaggtcccaaagtatgacagattactctttccccatcctttattgcccggttagtcaacaactagtagagtaagttattgacctttagagagttgtagaggtttttgggcggggggtggggggagggtgttagtgttgatacatattttgaaacatatacatgtatttttagatgtttttatattttataaattttgtcctgttaatgaaagagtgaagtactgctttctgataatctctcctcttcccatattgcctactataggcaaagttgtaaaataatttaagttttgaaacagtgtgagtttcaagaggggaacaaggtagcttcttttaagagtgtgtagaaatagttttgctgctatttggcgcttacttaatgctgctctctatacatttttcttgtggacatgtacataagccatgcaaggacacacagatgtttggcaataacagaatgataatagtacctgttgttttgctctagtcttaggaacttaggttgtcgctcatcctttcaaacatgttgtaagtgcagtgccacttgtatttcactttgacttgtctctgcataggcacgtgattaccatggtgattgagaatgactgattcttccctttttcttgttgcctcttaaggcaataactgtagaagagagtagaatagtgcttgctatggccttttattactgattcattaggttctatgcccttcaaacatatgtgaaaatacctgatgaaatgtggaagactacatgtgaacagtcctctcttctctcacctcttacggcctgttggccatctgagtggaagatggagggaaatgtacttaatgtctgtatatatgttcttactactgtattgcttcagttctctgggtgatcacagtggaagatccccaatgtaccatggagttaagatgtacagcagtgccctctttccctttattgcctcgtattttgaatgtttgaaagttgggtttgggtttctggtggtggttggttggttggttggtttttgctaagctggaaaagtagtttggaggcagagtgtatacttttcaggtgtacaaacgtgttgtcactgtgcttttccttccttgttttccctgtcctttctatgggtttatgagtaaagctagaaatctctctaagaggtttcttccttatgttggccatgcagtatcattgacagtagcattgacagtgacctggagctgctcctgggggctgaggagctggcatctgcttttcctatgtgtgtccctaggtgctcttgcttcttaatcacttaagccatttcattgggtgcctgtcctgatgaactgtggaactccgaatttagtgtcctcccattcctgttccatctctgtgagtaggcttttctttttaggtttttttttttttctcttagctttactggggactaagggcgagaaatatattctttataaatataaataattttgttactatactgtattatttcatttggtactgaatcctttacatgggcatttaagtacctaatgaaacgtggaggtccggatgtatgaaaacttcctcttttcccttttcctcattgcctctgtgggcaatagctgtagaatagcatagattttctaattctcttccacccagtgggtggaagtatgtatatactttaaaatgtaaatataaattttttaaactttttgttgttacttcatttgtacctaaatctatttgtggacacttaggtacataaagaatattgaggttcattctatgaaaaatctcccctttcccttccctcattgcctgtctgggcaatggcttgtagagtagttgtgtagctttggcatgggggtgtagggtgagaagagttctgggtttttacctttttggatgtatttaaaagtctgtcagttatttcagtttttcactctcaatctgtgtttgtgttatcaaacaaaccaagagtctatatctatgcccagaagtgtggaacatctgcccctcactctgtcacctgtgccatattgcagtagtgtatacgtactataaggcttgagttcttgttttgtctgttgcttatagcatagcttgttagagaaaaaggtaaccatataatatatatgtatatatgattgtaaatgccttgtggtgttaacttcattttgaacgtggtccttggtgcgactatttttactctgtacttaatgaacactgagattgattctatgaaaactctccacagtccctacccctcactgcctggtgggcagtggtagactagatgttttatttgcttatcttttgtttgctttgtgggggtctgggtgtttatatatttttaatgtatatataatattgctatattctgtatattattccacataacaccagttctttgctggaatttgtagatacataatgcaacattgaggtccagaggtatgataactctcccctgctcccttttcctcattgcctacagaggcaatacttttataacttggttttttttttttagggggtgggaatgggattgcttaggtgggtagtggttaggggaaagggtgagtgcatgattttaaaatatattttttcatggtactgattaggcccctagtcctttacatggataggtgggtacctaatcaaagttgaggatcagtgtatgacgtatctcccattctacccttccctggatgccggtattggcaagagtgagtaaagcagctgtgtcttatttacttgttttggatttatatttttgatagtagactattcttaatataaagttgtcatgtttttatttcattttgtgttcagccctttgcctaactgtaaagaacatcatgaaaattagtttcataagatgacagcacattgtttcttgcatatttcctcatttagtagtaggtagtacagctgatttgtagttttcctggttattctgagatatatatatatatatatacatatatatatatatatatatatatatgtatgtatatgtatacgtatatgtatatgtatatatgcatatacacatatatatgatacaaatattatactattatacatacatatttaattttctcccttgctctcattgtttccctttaatacttattcccttgaaggtttttacatgtacctagagaaagaaaacaaaaaaacaaaaaaaccaaaggctcattacatgttgagtgtctgactgaaagtgtagccctgggactccatgtgtaacagtagcaatgggattgcagcaaataagatgggagaagacactcaggtatggctgcattgaggaaactaatcatatccagcatttctggtgttgaattaaactgacatggtgaaagtcaagctttggttttgtaaatgccagagaaaaaacagagaacattgcacagtaaacctgagtttaaatggcctcagtggttgaggcaagctttgaagctagggtgtcaatatctgtgttttctgtaactaatctgaagagccctcgagagtagtgtgtctgtgaggcctgaagttcagatttctctccagagttcttttgattgttcttatgtacccaggagaagtcattgtgattcttagaatggatcatttgagtgattactgctcctctggtggctgacaaacaacatggtcccaaaagaatttcaggggtaagacctttcggtcttagaacatccacatgtggcagggcacattggccctttcttacccagaactcttttgtgtggctgcatctctttctccagttctctcttaactggagcatgcctattctttgtccttttgtctttagtatctttgttgttgttagatgccatctgaagttacactcacaagtttaagcaaatgctgccttcttgtcagccttgtgattctgtgtgcatttcatgcaagggaacctgtatgtttgctctctgcattcttacatttcatattgtctcttcttccaccacatggtaaatgttatgactacacatttgtcttcatcaaagaaaatgcatgtgaaaacctctctgtccttcttgcatcttagctttgttttgttctcacatttttactgatattccacaagaaagatttgccatatccatttaggaaacattgagcgatagatagttctcctagaaattctcaaagacatgttatttaccatatcaaactctcaggaatgtattggaaaattatcctagtaacattgctgttacttatacctgctgctggaggaaaaaagtttattcatgacacatttacctttgatcataaataaaagagaaagggccacctttttggagttagtcatggtagtcattagtgatatttttgaaccgtttttaatttgaaatacttcaaaggaagtaaaggtcatggcttagctcaaagaaatgctccagaagttgggctgcttaaatcatcagtacaataatatactgtgtgtgcgtgcatgcatgcgtgtgtgtgtgtgtgtgtgtgtgtgtgtgtgtgtgtatgtgtatgaaatgagaattgccacataattggagcatttacattcatccacaaatcatgttgagacaaactgtagctggccgtcttgattaaagccaagtggtccctgtggctgtgaggaagagtttttcttgcaaatactttggcaagtgatgacttcgaaacttacaaagctattgccttttttttttttaacaccagtagtgaccttcagttccttcagtctgagtttaagggtagaattctaaatttgtattctaatctgtcttttgtggaaaattttgaaaatagtatgtatatgtaatattgtatatgcaaattgtgttgttttacttgttttgcatatgaccagcactgactgaaaggcatgtttaactataaacactgttgctttctttgtgaaatgaaaataaaagtatttaaatacaaatattgtgtggattcatcttataagactgattatatattaaaagtatttcatctcagactctgagtttcgtcagaactgtccccatatatattatctaaattgcttcctgcctcactccagagtccttaacacataaaactcaaaggaacccaaactcacactgtgaacattttgggttgcgcaattatttgctttgagagactcttgtgcacactgtagaattttcaacatatactactgatgctggttgcatctacaggtaaccaactgcccatagcaacccctcactattctggcccttgtgagaaacaaaaatgttacttcatagatagaaaactgttcccctggtctggcagttaaaactgtgtgtgggtgtttggaacgacaggctcagtaaaggggttgctggttttagggcagttacttccttgcacaggtgcaatccttatgaacactcagatcctgtaagtggcaggtggctccacaataatttcctacctaggttactataaaaccactgaaagctaacaggtcccctgctttgatcatataagtcataccagccctactcaaaggacagtgctacagttatgttccttgttaggtccacaacactagcctattccatctcctagatcatgaattgggaaagttttaggtttctagatacagtaatgaaaactagtgttcttttactgtaatctctagagtttaatgttggacatttgaagacatatctagtgagtctcctaattccccaaagaccccagtttggggatttaaaagcctttatgtcgtacctttttaaaaagaaaattatgatgatcgttgccaatatttacaaaatgctcagaaattgcaaggatttaaaaaaaaactggctacatgttttataatcatagatatcaactgttaaatatgtgaacacttaggaaataaggaacacttaattccactaggtttgggatgggggtattgatttgataaacctctccttatttttcaaaatcacaacggggaagaattagatttgatgttagccttctgcttttctttcatctcaaaaagtcttccctcttttgacagacactgcctccagagtttacttagatttgtatgtggattgacatgtgctatagagtggtgccccccccccccccgagtttctctgtatagccctggctgtcctgggaactcactctgtagaccaggctggccttgaactcagaaatccgcctgcctctgcctcctgagtgctgggattaaaggcgtgcgccaccacgcccgccgagtggtgttttattatcagagcaaaaacatccttttaaattaccaatgtcactcaccttgatccccataactggcaagcttccaatgccttgtgcttatgtgcttttcctttgtagatgacatccagttaactggtcaaagtccagctgaggttaaatgtaactttgagaccacatatttttggtttgggattatcaaaaccttcacttatactaacattcagtctttcccactcactttcataaaagaacataatgcaattaaaataggtatccaaattaaattgttgacaagcactaggtggcaatagtttgaaagagaaatctgggtttttttttttttgtttgtttgtttgtttttttggttttctgagacagggtttctctgtgtagccctggctgtcctggaactcactctgtagaccaggctggcctcgaactcagaaatccgcctgcctctgcctcccgagtgctgggattaaaggtgtgagccaccacaagaaatctgggttttttaaagaggctaaacacaggcaggagaagcctagggtgtcaatattccttgttaaggtgacaagctcttgatttacaagccaagtctgggaaatggg

SEQ ID NO: 815 - DNA, 3733 bp, Mus musculus
ccgaaacacggccggatgcagtagtaggtgtaccagttgtatgaaccggggtactacagctctgcggcacagacagcgcggcggctagaagtgagctccgggggtggggctctaagccccgccccagcactgcgctcctccccgccgcccctgggcggagtgggcctagggttgagcgatgcttagcgtccacgcctcagtgggtcttttgcagcagttgcgaaaacccggaacgaaggtgttgttgccgtgcggcggagcggcgccgcccctcgccgcacctccccggcagccctcggaggcctttgctgggcatgctcagtcgtcaggaccgcttcggctctcggagtaggaagcttggggcgctgggctggtaaggacccgcggcggggcgaagatggagtcctttaccaatgatcggcttcagcttccaaggaatatgatcgaaaacagcatgtttgaagaagagccagatgtggtagatttagccaaagaaccttgtttacatcctctggaacccgatgaagtggaatatgagccccgaggttcgaggcttctggtgcgaggtcttggtgagcatgagatggacgaggatgaagaggattatgagtcctctgcgaagctgctgggcatgtccttcatgaacagaagctcaggcctgcggaacagtgcagcaggctacaggcagagtccagatgggacttgttcattaccctctgccaggaccttagtgatctgtgtttttgtcattgtggttgcggtctctgtaatcatggtgatttatctactgcctagatgtacctttaccaaagaaggctgccacaaaacaaaccagtcagcagaactcatccagccagttgctacaaacgggaaagtgttcccatgggctcaaattaggcttcccactgccattattcctctatgctatgaacttagcctacatccaaacctaacctcaatgacattcaggggatctgtgacaatttcacttcaggctcttcaagacacacgggatatcattctccatagcacaggacataatatttcaagagtgacatttatgtcagcagtttcaagtcaagaaaaacaagttgaaattctggaatatccatatcatgaacaaatcgccgttgttgccccggaacctcttctaacaggacacaattataccctgaagatagagtattcagcaaatatatctaactcttattatgggttttatggcatcacctacacagataaaagtaatgagaaaaagtactttgcagcaactcagtttgaacctctggcagcaagatctgcttttccttgttttgatgaaccagcatttaaggccacatttatcatcaagatcacaaggaatgagcaccatactgcgttatcaaatatgcctaagaagtcatcggtccctgcagaagaaggacttattcaagatgagttttctgaaagtgtgaaaatgagcacatacctggttgctttcattgtaggggagatgaggaacctgagtcaggatgtaaatggaactctggtttctgtgtatgctgtaccagaaaaaattggtcaagttcaccatgccttggacacaactataaagcttcttgagttttatcaaacttactttgaaattcagtacccacttaagaaattggatttggtggccattcctgactttgaagcaggagcaatggaaaactggggcctgcttacattccgagaagagactcttctgtatgacaatgcaacttcttcagtagcagacagaaaactggtcactaaaatcattgctcacgaactggcacatcagtggtttggaaatctggttacaatgcagtggtggaatgacctgtggctaaatgaaggctttgccactttcatggagtatttctctgtggaaaaaatattcaaagagctcaacagttatgaagacttcttagatgctcgatttaaaaccatgaggaaagattccttgaattcgtctcatccaatatcatcatctgttcagtcttcggaacaaatagaagaaatgtttgattctctctcctattttaagggagcttctctcttgttgatgctgaaaagttaccttagtgaagatgtatttcggcatgctgtcattctttacctgcacaatcacagctatgcagctatccaaagtgatgatctctgggacagcttcaatgaggtcacagacaaaactctagatgtaaagaaaatgatgaaaacctggaccctacagaaaggattcccgttagtgacagtccagaggaaggggactgagcttcttctacaacaggaaagattttttctacgcatgcaaccagaaagtcagccttcagatacaagccacctttggcatattccaatatcctatgtcactgatggaagaaactattcagaatatcgatcagtttcactactggacaagaaatcagatgtcatcaatcttacagaacaagtgcagtgggtcaaagtcaattcaaacatgactggctattacattgttcactatgctcatgatgactggacagctctaatcaatcagttaaaaagaaacccttatgttctgagtgacaaagaccgagccaacctgatcaataacatctttgaacttgcaggtcttggcaaagtgcctcttcggatggcatttgatttgattgactatcttaaaaatgagacccacactgcaccgatcactgaagccctgttccagacaaaccttatctataatctcctagaaaaactggggcacatggacctgtcctcaagattggtggccagagtacataaattgctccagaaccaaatccagcagcagacttggacagatgaaggcacaccatccatgcgagagcttcggtcagccttgctggaatttgcctgtgcccacagcctagagaactgtaccactatggccacaaatctgtttgacagttggatggcatcaaatggaactcagagcctgcctactgatgtcatggtcactgtgttcaaggtgggagcgagaaccgagaaaggctggttgttcctctttagcatgtattcctccatgggctctgaagcagaaaagaataaaattcttgaagctcttgccagctcagaggatgtacataaactttactggttaatgaaaagtagccttgatggtgacatcatccgaacacagaagttgtcacttatcattagaacagtgggcagacattttcctggacacttgctggcttgggattttgttaaagaaaactggaataagcttgtacataagttccatctgggctcctataccatacaaagtattgttgctggatctactcacttattttcaacaaagacacatttatctgaggtccaggcattctttgaaaatcagtcagaggcaaccttgaagcttcggtgtgttcaggaggctttggaagtgattcagctgaatatccagtggatggtcaggaatctgaaaacgctctcccagtggctgtagcactcacagctgatctccggcgcccatggctctgctgctttcgcaaaggttgagtgaaggccggcctgctgctgagttgtttgcactgttaggagttctagttagctcagggcccaattgtatttttcatatcttttctgaaatgtctttaggcagtagttatttattacaaaattatattcacctgtatgtcatccatctacaataacaatgaataacttttctttgacacacaaatggagaaaaaagtcagatttg

SEQ ID NO: 816 - protein, 1017 aa, Mus musculus
MESFTNDRLQLPRNMIENSMFEEEPDVVDLAKEPCLHPLEPDEVEYEPRGSRLLVRGLGEHEMDEDEEDYESSAKLLGMSFMNRSSGLRNSAAGYRQSPDGTCSLPSARTLVICVFVIVVAVSVIMVIYLLPRCTFTKEGCHKTNQSAELIQPVATNGKVFPWAQIRLPTAIIPLCYELSLHPNLTSMTFRGSVTISLQALQDTRDIILHSTGHNISRVTFMSAVSSQEKQVEIYPYHEQIAVVAPEPLLTGHNYTLKIEYSANISNSYYGFYGITYTDKSNEKKYFAATQFEPLAARSAFPCFDEPAFKATFIIKITRNEHHTALSNMPKKSSVPAEEGLIQDEFSESVKMSTYLVAFIVGEMRNLSQDVNGTLVSVYAVPEKIGQVHHALDTTIKLLEFYQTYFEIQYPLKKLDLVAIPDFEAGAMENWGLLTFREETLLYDNATSSVADRKLVTKIIAHELAHQWFGNLVTMQWWNDLWLNEGFATFMEYFSVEKIFKELNSYEDFLDARFKTMRKDSLNSSHPISSSVQSSEQIEEMFDSLSYFKGASLLLMLKSYLSEDVFRHAVILYLHNHSYAAIQSDDLWDSFNEVTDKTLDVKKMMKTWTLQKGFPLVTVQRKGTELLLQQERFFLRMQPESQPSDTSHLWHIPISYVTDGRNYSEYRSVSLLDKKSDVINLTEQVQWVKVNSNMTGYYIVHYAHDDWTALINQLKRNPYVLSDKDRANLINNIFELAGLGKVPLRMAFDLIDYLKNETHTAPITEALFQTNLIYNLLEKLGHMDLSSRLVARVHKLLQNQIQQQTWTDEGTPSMRELRSALLEFACAHSLENCTTMATNLFDSWMNGTQSLPTDVMVTVFKVGARTEKGWLFLFSMYSSMGSEAEKNKIASSEDVHKLYWLMKSSLDGDIIRTQKLSLIIRTVGRHFPGHLLAWDFVKENWNKLVHKFHLGSYTIQSIVAGSTHLFSTKTHLSEVQAFFENQSEATLKLRCVQEALEVIQLNIQWMVRNLKTLSQWL

SEQ ID NO: 817 - DNA, 116219 bp, Homo sapiens
tctacctccagggcccaggctctcacctcagtcctgggctgcccttcatttaccctgtagtaaatgtagtgcagtttctactaaacacactgctccttatttaccctagaattccttcagtgcaggattatctgaggaccacctgtgtcacaatcacttgataaagatgcagattttaggcaatatctcagaccaactgaattgaaatttcggggaacaatgcccagaaatctgttttgttaacaagctccttcaagaaatttaacagtcaccacagtttggacttccagagtgaagatttctttctaagcatttctagtaggcttagggttccatttgggaaaaaatggaaatgatatatctatacctgtagaattttctatagcatttctgtttctaaataggttagtgtttaattgaatgaaatctgtacctttttaaatagtagcaaccagatgggggaaaacaaacttgcttgagcaatggtgaatggagatactcacagtataatttgctttttttttttttttttttttgagacggagtctcgctctgtcgcccagggctgcagtggcgtgatctcggctcactgcaacctctgcctcccaggttcaagtgattctcctgcctcagcctcccaagtagctgggactacaggcgcgtgccaccacgcccgactaattttttgtatttttagtagagatggggtttcaccgtgttagccaaaatggtctcaacctcctgacctcatgatctgtccacctgggcctcccaaagtgctgggattacaggcttgagccaccatgcccagccattactgtttcattttaatcaagcattgttattatggtttctaaaaagtataacctcaagtctttcatatatatcagtttatcagttttatatcagagatataatttacatggcataaaattcatccatttaaagtttataattcaatggtttttagtatagtcacagggttgagtgcctagcaaaacgatcaatttcagaatgttttcatcaccctaacaaaaaaccctatacttattagcagacacttcccattcttgcctcccttcagtctaaggaaatcactaatctactttctgtttctatagatttgcctagtctggacatttcatataaatggaatgatacaatacatttcaaataagtggaataataacaatatatggtcttctgtaactggtttctttcacctaacataatttttaaaaggttcatctatgttttaacatgtcagtactttctttttattgttgaataatattctattatacatataaatgtttcacattctatttatccattcatcagttgatggacgtttgtgttgtttatactttttggctattgtgaataatgcagctatgaacattcatctaccatttttgtttgtttgtttgtttgtttcaagacagggtcttactctgttgctcaggctggagtgcactggtgcagtctcagctcgctgcagcctcgatctcccaggctcaagcgaacctcccgcctcagccccacaagtagctgggactacagacatgcatcaccatgcctggctaatttttttatttttcatagagacggggtttcaccaggttgcccaggctggtcttgaactcctgaactcaagtgatccatccacctcagcctgccaaagtgctgggattacaggtgtgagccaccacacccagtctatgtacaagtttttgaatgtgcataagttttctggtcctttgggtatatatctaggaatggaattgctggatcacatggtaactgttgcttaaccttttggggagctgccagattgtttttgaaagcagctacaccattttacattcccatcagcagtgtatgtggcttataatttctctacatttttgccagtatttactattatctggtttttttattgtagctatcctagtagatgtgaagtggtggcttattttggatttgatttgcttttccctgatgactaatgacactgaacagcttttcatgtctcattggccatttgtatatcttctttggagaaataatattcagatcctttgctactttttttttttgtttgttttgagacggagtctcgctcagtcgcccaggctggagtgcagtggcgcaatctcggctcactgcaagctccgcctcccgggttcacgccattctcctgcctcagcctcccaagtagctgggactacaggcgcccgccaccgcgcctggctaattttttgtatttttagtggagacggggtttcactgtgttagccaggatggtctcaatctcctcacctcgtgatttgcccgtcttggcctcccaaagtgctggaattacagtcctttgcctacttttaattggattatttatcttttatcattaaatttaaaaattctttatatatgctagatacaagtcccttgtgaagtcccttggtttgtaagtattttctcctattctgtgaactgtcttttcatttctttctttctttctttctttgagacagagtcttgctcttttgcccaggctggagtgcagtggcatgatctctgctcactgcaaactctgcttcccaggttcaagtgattctcatgcctcagcctattgagtagctgggattacagacacagaccaccatacacagctaatttcttgtattttgtatttttagctaagctggtctcaaacttctggcctcaagtgatccgcccacctcagcctctcaaagtgctgggattatagacatgaaccaccacgcctggctatcttttcatttcttgatactatcctttgaagcatactttgttgatacttatcttcaaccttatttccattacaatgaagttgttatgagttgaatagtgtcctccaaaatttatctgttaaatttataatcccccatatttcagaatgtgaccttatttgaaatagggttgttgcagatgtattagttaagataaggtcatactggagtagggtgggcttccaattcaatatgactagtgtccttattaaaagaggaagtttggacacaggtatgcacacaggaagaatgtcatgtgaacactggagttacttgccacaagcctagggactattagaacctaggagataggcctagaacagatccttccctagtgcctttagggggagtatggtcctaccaacaccttgatattggacttctatcttccagaactatgagataatgaatttctgttgtttaagtcattcagaatgcactaggttttacagtagccctagtgttagaataggtagccaggcagacatgagcatgacagcagagctccccatccatgtctactattttagagaggcaattgttatactgtctctctaaaatagtaactggttgcagccagcgtcagggaaaggcaatctcgcaatagatagaaaacaacagaagctggtgatcagcagcttctcagtaagatctcatgagatgggtaagagggctcaagcatgtgcactaagaggcaaaatggcatacaacaagtatatggccttcctctaggattgctcaactggtaaggcgaaaacacctcaagtgaacatgtgtacaacttcagtaaggtgatcgctccctagtgctggcaggtcacagcacatgcagacagcccaccacaagggataaagcaagggaggagacacagaaatcctggcaccatgccaatgtgtaaaacccccaagtcaagggccaaacagtgcacttggatctctcaggtacacttggccctcttgcaagtgtactttacttcctttcattcctgctctataactttttgataaactttcactcctgctctaaaagttgcctcagtctctctgccttatgcccctcagcagaattctttcctccaagaaggcaaaaatagagtttctgcagacccgacggatttgccattgctaacactagtaaactaatacacatgcccaaaataagttagatctacttttctttctccttccttccttctttccttccttccctccctccctcttttcttttccttccttccttccttttttttcttccttccttcctttctttcttcttgagacggggcttcactctgtcacccaggctggagtgtagtgcaccccggcgggagtgtagtggcatgatcttggctcactgcaacctctgcctcctcagttaaatgattctcttgcctcaccctcctaagtagctgggactacaggcatgcttggcatatgttctcaggatctcctggtcctctgtaatgggtgatggccattcatatttagctcagaataaatctcttcaaatattttacagagtttgactcttttcatttacaataatataccacttcttggtttgtaatcctaattatattaatcaattatataaaaaattacattgtatttaatggctccatctttactttcctatataagtgccttagggcacttatttattaaaatatatcagtgtttataacctttagtggacatttaggttgcctgcctaacattttggttgcttaactcctgtaaactaaaaataaaattctaagcctcccaagtgactgaacagaccatgtcttggccaaggggaccccagggtaaccttgaaaactaaattctcattcatgacaggatgccagggtcaaacaagccttattataccccttcctcaatattcaggattagcctttcttccctaagggctaaacggaaaccagcccttttgaaagattccacccctaatatcaaccaaccacctgatattgcctctagttttttgcctgataagagatcaccacatggagtggttctggcccatctccagagaatgcacagtaagagttttcatgtcctctgcttcaccttttgatgtcagaggactgaaaactccaccctcggatcatgttaacactgccattttttgtatatgggacccatgaaggggcatgaagctccattgcgcatgcacacatttatcctttgataaatattcatgactcctcctatagcttattgaatacatatatttggccaccctgctcagcataaattcctgttctctttgcccctccctcagagtgtctgtttctggcttctggctgtggggtcagcctgtcagcatggccaccctacaggctgcaaccctttatgagaaataactttccaaatttgtgaacctcatcattcctcagttgacactccccttttcctttctgaatggaaaatggttttgttcaaatacccctctcctcccatacgaaacaaggaaggtgatcttaaactcagcagatttaggctgtactttgtctaagaaactagtcatagtgttactgaccactggttcttgggctgtcaatgcaatagagattgatgtgaggccaaaacagtttccctagacaagccttcattggagcttatgcttggacataagggaggtagcacaaaagagagaattccctgactgactccccaaaaagaactagtcgtggttttttattaggcaaagtgcgggaattgacatcaggggtaggatatgcaggctggactgggcaaagcatatcatgtgtaggctatgcaggtcagcattacctggttagtatggctatcttgagtaatgggcagccagaggcaacaaggctgtaaatcaattgttcagcattccttccctacctaggacactccacaaccttggtcatctcctaaggccagttctgggaaatctttttttttttttttcccagacaggatctcactctgttgcccaggctggagtgcagtggtgtgatcttggcttgctgcagcctccaccttccaggctcaagcaatcctcccacctcagcctcctgagtagctgggaccaaaggcacagaccaccacgcttagctaatttttcaattttttgtagaaatgaggtcttgctgtggggtacacgttggtcttgaacttctgggcccaagcaatcctcccaccttggcctcccaaagtgctggaattgcaggtgtgagctattgtgcccagcctagttcctggaattctttaagtaaaaggcatggtttaaacattaaggcatcagtgaggtagtagtgtaggttttgtgctcggtgagggtgcatgaaagaatgctctagtaggggtgaggtgaagctaagccccatttctactctgtctcaattataacctcattttcatttccagtgattggtctacaaatgtacaaaatatagttttggtaaatgagacctaaggagaattctaatggggaatttctgagaagggtttcccctgctctcaagaaagagacacggaagagtaagttccttcttcctcccctgctgcagccaacttttgaccatatggtagtctgggctttggggaattgctcatatagaggactgaagagtggagagagagaagttgggctcttgatgaggctggtgagctgtgattgaagattatcttatcagtggacttgttatatgaaatgataaatgtctgtatcatttaaactagttttactcagagttttgtcttttgtagcccaaggaatctgaactagtatatcactgttctttccaaataataacctttcactttatttggctgcgtttttttgctaatgcctaagctctacttgaactttattagataattattctgctttcttctgtgctctaaacatttcttgatttgatacaacttcaaacattactaattaatgcagtgtatgtatgctacaaatgggttacaaaggcaatgagatattgactccttcggtccttagggtggccggaaacctcatgatggtcagccttgccctggcgggaagcagcttcctccatttattcgagtgctgaacaaataacattttcaaatgtgttcaatgaattaatgtattgttgcttatttcaaaataattagaaagatcacttagcagggctgaatccaaattccctatggaatatcaactaattaagttggaatcttaattaaatgattaatggaatagacttctaatagatgaaattagctatatttctctctattccatattcttttcgtggatttttgtcattgaccccaatttgcttgtggaaactgggagacaacagaaaactctgaagcactggtttagaacacagatggcctgagttccagtccatgtctgctcgtggattgtgcgtaaatattctaccctctctagacagtagttccctccttatctgtttcaatgtgaggcttggatttgctgatctatggaataccaagtgttttattttgataaaaatatccctatattcattgattatcaagtttgtcagttctttaaacaaatgcaatttgtttttcagggtgcttatatttttttcctgtcatgctatttattatgtattataattaactctccaaattaatggttttcaagtgttaaatggtagagagcaatgattccgaagacagtagatgggtatagtagataatgtcacattatctcctttgataatgaatcgtaacttcataataacttaaactgtcatattcttaaactaaagaggaagttctgtgtgggaggataggcgggtgttaaagataaaaacataatgggttttggttgtgaaattgtgatatcatattccctcaaaaaggctctatgaagtcaaatgtaaaacagtatccgttgaaacaaaacaaacttcattattattcttttgctcctaggtaggcttctgaaacatttcgtttgtttactatttttacttcttatacaaaaccacgtcttttttttttttttttttttttttgagatggagtcttgctctgtcgcccaggctggagtgcagtggtgtgatcttggttcatcacaacctccgcctcccgggttcaagtgattctcatgcctcagcttctcatgcctcaccctccggaatagctgggattacaggtgtgtgccaccactcccggctaattttattttttgtatttttacatgtctttaaatggtccttcatgtctttgtgtgtgtgaaggaatgggaggggtgggaggcaagaggttggcaaagaaatcatttgtctctttgtcaaagaaatctcaaaaagacataatgatccacctatattcgctagtgcatttttttttatcacgtctctgcagagttgggatatgtaaaacaaaacacaaggtaacatgtttcacacttaaaagcatgatagactgtaggttacaggtgaagtgaggtgaggtgatttaacaagctgcagtgttttaaatatctcctatactaagtggtttggttgcaaaaggaacttcaagggaacatgacatgacctaaaatatagagaagagcgtcttatttaagcaatacaatgtgtgaagtatgttaacaaaatctagctctgcgtgtactatataatatctgaactgggatacatcagctcctgtggttcactatttttggttctaaaatgtcagtactaggggccagcctaacggttctgattacctttcacacattagggagatagcagctctgaggtatcatatgatacagacaccttctctgtactgatcaaacacatcattcagtatggagtcattaactggaagggtttgcagcagtggaagtgaactctaaacaccactatgtccttcacttattcatgcaaaaattatttattgtatacttacccaggcattggggatacagccttaaaaaagattacgactctgccctcacaaagcttgcattcttgagaagggagactgataataagcaacaaatccaaaacattgtttcagacagtgatgagtgctgagaaggaaataaagcaaggccaagtctttatagagtgtttgtggctattttagatgtatggtcagacaagggttctttgcagaggtgacatttgagccgagacttaaatgacaagatggaatcagtaggcaaagcactaagcagaagaaacagttcttgtgcgaggagcgagcaaaaggaattattaacaatgatggatggaacttggcgacttccgggaacagcatgaaggcctttgttaccaaaatatggtgagtatgtgctgatgaggtcccagagttaggcaaggagtttcattttttattctaagtgcagttggtatccactggaagtttcaagtagagcgtgcgttgtgagggatgtaataacaacaggcagtttaaaatacaatattgtacttcgatttgacttcttcgaaacctagtttccaattccagtgctggtcaaacaacaccctggccgtccctgtttgagcaggctgtttgcgcttgccgcggcttgtttgtccctggcgccccgctgttgaaagcctcagagcgtgtgacagttggcaggcgcagtgaggcgcagcccgagccaagtcaatgcaggggccggggctgagggaggggaagaggcagaggaggcggtgatggcgcgctgggagggcggcggcctctgcagcgagggtggtggcgatgcgcataccgagaggataaggaagcggttcccgacgagcctcctcggggcttatggggcccctggcggttcggcctcggaggctagcggggctgcccgatttggcactggaaacaatggtggctcggggctggaggcaatggcgcgagtgctggggggcaggggcgactaggggagtttcggtttctcgggcctagcgccgcggagccttgctgcgggccccagtggtagcacccccgggaaccgcaggtgttgatttaaggctcggaacaggcgggccttctgcccacatcctgcggcgcccgcgacccgggccgggcgatccggcgccgggttttgttatccgcccgcacctagaggccgcaaggcagccgccagccccgggactggaccccagggcgccctcggccctgcgaggtccccgccctctcttccgtctcctcctcaccgccctcctgaggcactctgatgcgggcgggcatctctgccgaaaacacctacagcgcccgctccctcggtccttcgagcagtgatccctccgcggccaacctccccagggaaaccagcgattcgcggttcagatagcgaccttcgcccgcaggttcctgctctgccttcagacttcggcttcagtggcacctgctcagcgaggcctcgtctaaccaagccatccgaattaactacccactcactcgccatcacatcaccccgatttaattcgcagcggggcactgactttacactcgtgtgtcttctgtgtttatttatggtctgtttctggaatgtccgctcctgggactgggaccatgattttctggcgcagtgcgggtgtctcggcgtccgggatcgggcgggtcgcagtagggctccacatttgttgagtgactgaacaccgttcccggccggggagagcgccgcagccgggtccacttcaggtaggggctgggctttcccggccccgcctaggccccgcccccagcgcgaacccgctcccacctcgcctgtccacggagcagcagggggtttgactgtgcttttccctcttgcttccctcgctctttctgcagctgccacgaaaacccggaacggcggagcggcgccgcccctcgcggcacctccctggcagcccttggaggccgcgctgggcatgctcagtcagctgggccgcctcagctctcggagtaggaagctcgggcgctccggctgtaaggagccgcggcggggggaaaatggagcccttcaccaatggtgagtgggctgccgaggcgccgggacccgggctctccggagccctgagggtcgtgggcagtcgtgacacgcggggtcgggctgcagccgtctcccccaacaccgcgggcttcccacgagggctgagggaggcagggagaggggatctgggggaggcagggaggttcggggggcgggcggcggccagtgcgggacccggggctggcttgaaggtcagcgccgccgccgctcgcccggggtgcggccggtgggcaaacagcaaagtttgggctgctgtgcgcagaggagtgggcagtgggaaagttggcagctcaggtttgcccccggaggaggcggtgtcggcccgactctcctgtaggagcgttaagttgtggcagctgccgagcccaacttttgtggggcgccaggagctgtccccctgcccttcagtgagctgccggcgtgacttttcctaatagggcggggtgggggtgggaggcttggcaggttaatgttgtggaaggaagggaaacttcaggaaaggcttgctcacctcgctcggtgccgcggaggtgcctggccacagtgccaccctcctgaccctgccgaggtactcggcagggccaccacgcatcccctcactggctgcagatcacatcagtttttcagtcaaagacttgttaatgtcaagggtccgtcacggtggtgataccactgtgtgacaggaagcgagagtcaacgcagggagcctgcaccctgcaaacagccacagcccttcactgaacggggagcataaatcccaccctagttagaaccatggcttttgtgcggaccagaagtgccagagccacaatataggggtgagatgtcttaccgttttgcggtgttgagtgtgtggattcccttttaagatagaaagtaggaaaactgccagtaagggagacgactcactaaaagaggattcagtctctggttgacatgttttgctgagtgtggttggttacttcaggtacagtatcacattaataggggccacagtctatatccctgtttagtttgttagttaccactcaagagcagacagatattgtccactttatcccaaatcccagccagactttgttgtatgctgtgcttcattcatggggctgtgaactactgattatattctccctattcctaatgtagaatgctttattctactgccatctttctgtctgcactgtttaattaggcttactgataacaactttaattctgaattttctttctcattcaggttctatttgtaattactaagacttaaagaatagtctggtgaagttactcgaagaattaaggaaggtttgagctaaaatgaactagagaccatctagtactttagtgtaaaatatgtttaatacaagtcgttaagtccttgtaagtgactattccaatgttcattctttgtttttggaagaatgcttggagttaccatgtttttaaatgtgaaatttcatctaaattaaaaaaaaaatctctgtgatgaggctgactcacccatttggtcaagattagtgctagctgatttgctgaacctttgcctacagaattaaagtactttctcaagttttaaaattggtgtcttttctcttatagaatatgcttctagattgcttctagatgtgggtatttgcaaactgtcacatttgggaggacaatggaaaaatcccacagaagagaacaaaaaaagaagcaatgcttcaactttcatgtaggaaattggatttctgattctttcctatctttcagagttgatgctggagacagcttggcagtgcataattttggttaatgtagcaatcactccttggagccttatttagcatccttttacaaggaaaacagaaacgacaatatctacagtcaacaagaaattaaatgttagcaatttgaagtgcttttcaggtttaagatggacagggtatttatttgaaaacttttgaaggattgctgtagaattttctagtgttttcaaatgacatggtacagtagacagttatatacttcatccttttgagtacaaaaaataatgcatgtataatgctcccattggtctgggtgtgatgatgcagagtatttcattatccatagaatttatgattgcaagatttatcaagcctggtattggattttgttacacgttcatcctcttttaatggaatctttcccacttacactttttcatgtatccctatatatgtagagaggtgtatgagcttaacaaaaaacagtttcagtaatttaggaccacatatcttttagttaaaatcttgtcagtggttccatctactgacctatgcatttgtaaaggaagtgaatttagcttatatcttgtcactctagccttcaatactcatctattccagtacgttttttttgtagtttccctgttttctgtccaaagttgccactggtatgacctatttttgttgggccctgctctctacctgttgataattggttcatttgatgaatatcctatgttaacctgttcaggtaacatacttctgcaacccatttaaaatgcatatccctggaaagggcttataaggatggatcttagtgctaggaattcccatttagctcaggatctatttttggctttgtccttgggagggattgctattatgttgaagtctggacatctggtctgggtttggatctttggtggctttttttatgaagagagatgtgctggaccagtacttaagattgttttggcaataatgattatgtcttattaggcaggtagaggtaaaactgttaagtaatagtgatttgtatattacaaaaaaaaaaaaaattgaaggcaactatctgcttttttggttagagatattagattaaataattctttgatgtttatccagatttttgtcttcatttgcatgcagggttggtatattttgtaaaaacttaaattcatcttaagaaatgcaaatgctaaggttcaccctcagaatctgattaaggaggtctgattatatatgaaatacatactagaaagtatgtatactttctttttttttttttttgagacacagtctcactctgttgcccaggctggagtgcagtggcacaatctcagctcactgcaacctctgcctcccgggttcaagtgatcctcctgcctcagcctcccgagtagctgggattacaggcgcccgccaccatgcccaaataatttttgtatttctagtagaaatgaggtttcaccatgttggccaggtgaactcctgacctcaagtgatccgctcaccttagcctcccaaagtactgggattacaggcatgagccaccgcgcccagctgaaagtatatatactttctagtttgtgatatattctaaagtatatctaaaggttggtattttggcattttgaggtcccagaactgaaaacataaatagttttttttttcatatgaatgtaggtcctatgaatcacttttattaccgcagtgtggtgcataatcaaacaaggaggacttagttgtcttaaaaaattatttttgctttcatgttcagattggtatccagttgaaagtatttttcaacttcaaaaatgggaagtctgggcaacaaatgagatatttgtgggttgtaatacagtataaaattgtgattccatcttttaatcttacaaataacaattgttctatagatatgtgagtctttttaaaaaaaaatttttagcatcacttctcaaaaatgtgagcataccacattttgtttttatttttcttttgctctatgataaatttccacattgaaagacaactcttaagaaataggagctcatagtttctctgtgtgatggaatataagttaaatcctgtttttatctttctgtcttaagtttttaattttatttgggggaaataagactgttaggaattaagtgttagcatcactaacaatctagggttaaagctatagctagaaacagcccagtttttaactggaaactagtggtagaaaagttctttgctattacttgccagtttccaaaaactgtcttgatacatgcataaaaacagcatattttagaaactcttataaccggtgattatcatttatctgtaggttatccttgagaactcagcctgaaagatagataaccagagagattggttataaggaaattatatagaaaataagtggtaattttctgctcagtaattcaatcatacagctatcttttgaatgcccatttacaagtagattttctgctagacacagttacattaaaaaaaaaaaacccacaacctcgtcatcagataatgcttacctaaataagagaaatgaatagaagaacctagttttgttgtcatgctaatatgaaatatggaaacacagaagaaataaaaaagcaataaagttttgtctaagacagtattctaattatgaaataaatgtacagaaactgttcataactgtttgcatgtctactaatttagtgtaatactcctattaggaaacagcagtattaaccctgtctatgaaaacattaggaaattgagatttgaaagagtttagccaagattaccccagatgttgggatggacctagatgaggcctgtggttcttggcagtcgaggtgaggtcagtgcagctatgttttgtcaattagtcacctcatgacttgaaaactgtagggcagcagtccccaaacttttcgggaccagggaccacagtcggggggatgtatgtatactttctagtttgtgatatattctaaaggggagaaggtttggggatgactcaagtgcattatatttattgtgcactttatttctattattattgcattgtaatatacaatgaaataattatacaactcaccataatgtagaatcagtgggagccctgagcttgttttcctgcaagtagacagtcccatctaggagtggtgggagacagtgacagatcaggcattaaattctcaaaaggagcacacaacctagatccctcacatgcgcagttcacaatagggttcgtgctcctatgagaatctaatgccaccactgatctgacaggaggtggagctcaggtggtaatgctaacgatggggactgactgtagagatgaagcttcacttgtttgcctgctgctcactcctgctgtgtggcctgattcctaacaggccagagactggtactggtctgtggccttggggttgggcaaacctactgtagggggctggagttgagctgatactactaggcctttccatagtataattggagcaaccagaaagacacagtcttttatttatttatttattattatttttttaatttgaatccgtagataaatttcagcaacttttctgaaagtttgcaagaagccaggattgagaatgaagggacattttggagcccttgtggtggtacagttctttttatatctagatcttgacctagatctacatatggccgttatagagagtgttgcttattgccttggtgtttctggacagtaaatggaacatcaagagttctctgtgtccatggaagggtggacaggattcccttgtaaccttatccattgttgtaattcatttgtgattgtcctagcagcacctgaaggactttgcattttacaaagatgtttagagaaaattggaagaggagaatcaatgatgaagatgaaagaaatgtggagattgggggtaaaggaagaagctgataggcagagattttaaaaatggtcatgccttgatccttgcaagtctttggttcagaaatgagcttcagttggagagcaggacactgttgtatgaggttgaagacagagtctaggttggaaggggacaggtaggtaggtctggttggattaatggaattgggggctcaggggacaaatgagttaagattggcatttgggagccttgccaagagatagaaaacatttgccagaaatttaagcatactgtcttttttatagtcagaaaattcagtcactcgtaagttgggactgttcacttgtctgaatgttttagatttaaagaaaaaatatagctctttgataaacaacgtggtgtggagctgtggtaagcctgctcttgctcctgactcaccgccgctcgctctcaccaaaaaacaggttggtcaggagatacagaaaaacgcccatgaagccagaggtggcaattcactgaattagaatcactctaggcccagcgcggtggctcacacctatactcccagcactttgggaggctgaggcaggcggatcacctgaggtcaggagtttgaggccagcctggccaacatggtgaaaccctgtctctactaaaaatacaaaaattagctgagtatgttggcacgtgcctgaaatcccagctactcgggaggctgaggcacaagaatcacttggacccaggaggcggaggttgcagtgagccgagatcgtgccactgcattccagcctggtgacagagcgagactccatctcaaaaaaaaaaaaaaaaaaatacgagaacacttggacacagggtggggaacaccacacactggggcctgtcatggagtcgggggaggggggagggatagcattaggagatatacctagtgtaaatgacgacttaattggtgcagcacaccaacatagcacatgtatacatatgtaacaaacctgcacgttgtgcacatgtaccctagaacttaaagtataataaaaaaataaataaataaaaagaatcactctaacgagctgcaaggtaaaatccttggagaaggtgtgtgccgacttgatcaatggatcaaaggaaaagaatctaaagtgataggaccagtttgaatgcctaccaagactttgagaaacattacaagaaaaacttcttatgaaggttctgagacatggtattgtttccagatgagaatccataagtgactcattgacttccacagtctttctgagattgttaagcagattacttccatcattattgagccaggagttgaggttgaagtcaccattgcagatgcttaagtcaactattttaataaatgattaccagttgtttaaaaaaaaaaaaaagaaaactatagagagctatctaccttttgggactaccatggtagcagtcatttgctgttcctttttttgggagggacgggaacagggtcttgcttggctggagtgcagtggcacggccacagcactgcagccttgacttctcaggctcaagcgattctcctgcctcagcctcccgagtaactgggaccacaggtgcacaccaccatgcctggctaatttttgtattttttgtagagatggagttttgccatgttggccaggctggtctcgaactcctgggctccaatgttctgcctgtcttgacctccccaagtgctggtactataggtgtgagccagtgcggccctgtggccagcctactattctttatagcctggctttgcttcacttttctactggtgcttgtgatagaacaatgaaccaattaatttttttaaaattccatccttaacatgtaaatgaggaggaaaccaggtcatttgccaaataaggaaaattcaagcttccaagggagtttcaaaaaacaatggaggatcaagttcaattgtaggagactttttgaaattctttttcttctaatacatattgcttaatgaaggtactcctgggcattccacatatttcaaaaatgtagtcactgaaccagaacttgaatcagttgtctgaatttctctggattgtggggctcagagtcttctccagccaatgatctggggtgaaggaagttaaagaaggcttcttcaactgagggaacagaagaatgaggagtgcagtgagaaaaggatgcctctatgggttgggtgtgctcccttcctcttgcagcaagtgatgaacagtgctatgtgggagcatttcccggacaactgactcaggtgtcattcagtgccatagagaaaatttctggtaaggaaggaggcttaagccatagtatttctcacagctgaaactgttattttgtcaaatttaaaacagttgttagtatattcatcaatgaaacatcattacattgtcaatgaaacatttcattgtcaatgaaaagagtcaaactgtaaaatctttaaagaggcttattctgagataaataatgtgtgaccaaggcccaaagcacagtctcaagaagtcctgagaacatgtgcccaacatggttgggttacagcttgatgttatacattttagggagacagaagttataggcagacaacaatcaatacatgtaaagtgtacattggctcagtctggaaaggggataactcaaagcggggacttctattccagttcataggtggattcaaagattttcttttttgtttttcttatttttgcttttttttttttttttttttttttttgagacagagtctcattctgtcacccagactggagtgcagtggtgcaatctcagctcactgcaaactccgccgcccaggttcaagcaattcttgtgcctcagcctcctgagtagctgggattataggcatgttgccaccacacccagctaatttttgtgttttttcagtagagatgagatttcgccatattgcccagggtggtcttgaactcctggcctcaagtcatcacccacctcagcctcccaaagtgctgggattacaggcatgagccacacatgtggccacattcaaagattttctgattggcagttggtcgaaataattaagttattatctaaagacctggaatccatagaaaggagtgtctgggttaagataaggtaaggggtcatggagaccagggttcttaatatgtagacgaagcctccaggtagcaggctttcagagaatagatggttattatctcttatcagaacgtaaaatgtgccagactcttagttaaatctctcctggatcaaaaaaagacctggggtggtgcagtggctcacacctgtaatcctagcactttgggaggccaaggcaggaagattgcttgaggccagcagttcaagaccagcctgggcaacatagtgagagcctgtctctacaaaaaaattaaaaattaaaaaaaaaaattagtcaggtgtgatggtatgcacctgtggtcccagctgcttgagaggctgaggtgaaaggatcacttgagcctgggcaaagtggaagtgagctgtggtcatgccactgcactgcagcctgggcaagagagtgagaccctatctcaaaaaaaaaaaaaaaaaaagagatcagaaaggtctttttctatagaatgttccacacaagagacagctttgcagggccatttcaaaataggtctaagaaatatattttggggtaaaatacctttatttctttcacagcctgctatctgttgtgtgatgttatactagagtcagtttagaatttggtattttattgctacaaagagtgtttcgtcagtcttaagatctctgttttaatattaatgctggtcagttgtgccagaattccaaagggaggagagtataatgaggtgcgtctgacccccgcttcccatcatagcctgagctagtttttcatgtttactttggaatgcccttggccgttcagtcagaggggtccattcggtcagttgaggggcctagaattttatttttggtttacaaaatcattccaagatcctctttagaggaaaaatttatagagattagtgggaatgatgaggagaactcaatcttgagagctcaatcaaaaggagatgtttaaatatctttttaagttggtattggtaaagtgctttgaagacagaaagaatgtaatacatgtctggtgtctgcttgtcctataattgtcggaagggcctcaatgatgaaataagggaggctgccatgacacttgagtcttggtgagaggagctagtgtgtccacatttatcaagatcacctgcaggagtttgggctggccccctcttattagtagtttctctgttttttaaactggaggctcagcgccttagtatctagattgggtagctacattatgaagataactcaaactgaacaatagagtattgggtattagtgggaataagaaatgcattgctctttaaagcagcagcctcacttccatctgcatcagtacaggatactgagaggcttggtagcattccacttgtaggaagcacacagaaaaataattgaatatagaaaagagggtctagtgtgacttggggattagataatagagcatgttgaattagatggaaataagcacatgttcactaaagtgtggctagctttgttccagtccagttgttcactgcagttgggcataattctgttttaattaattaccaattcaggaaatattattgcgataaagacttgaagaatttatgcatagaatcttgtcttggcacatcatcgaatgacaatgactattagtagaaaaaatgtagttactatcccagccttttgactaatccataactaattttttaagttggttaatgataagcaaactggccctcagtcagttgtaaattgatgacaaagttgttactataaagactgaagactgtcgtatacctggtgttttatcaatccaatgagtcacatggaaaagtattacaaaaaattatctgcaaggtaattttttgttcagatccttctgagatctggcaaataaatgtattcaccaactgagatttcttgtttaactcacaagttttctgtatacattgaagagttcttataaatttcctttgcagatcccattcagtgatatgcattctttgttaaataactcacagatactcattatgtctaatgtaatttttcattttaaataaggaattataggttaagatgttcttttaagactatagtatagcgaattgatggaatttaaaagtaaactttttatctttagatcttgtgaaagtatttgcagctatgcagatttgcttgagagattaataagcataaatatttaggcatcattgacaatgtaaattactttatattgctaaatctaacaggggccctaagcattgttaaagactggcaccctatattgtgaggaaagatttaagaaatactatggaatataaagattttttgttaatttgattggggggacaagtttgtataaatataaatgtaaataatttaacctaggaaaagaaaaagaaaattgaaaattggagctaaaataatttgatttttccctcaacagggttattggctgtcttttaagtgactaaaagagcgtatctttatgtgaattttaggcatggtcatatgattaatacaaggataaagcaaccaaatgctctcagtatttattcccgtgctatttgtctgttttttagttcatggagtattgtattgtacttggtaatttgatgcttttgagatgtcctttagacagatttttaactacaggacttcctctgtagaatcgacaatgtgtttcactctctgtggcattgacaatgtttttgaatgcctaattgttcagtagaactccgtggttattattacaactttgtacattattataaatattttatattagttgtatattccactgcagatagcaaccagaaaactaaatacagaaatattacatatagagagaatataatgtacaaaaaaaatcttgggagatgagtgctttgggtttaattctattttactgaaaccagagaataataggattcaaatctacctaatttttctatttttctgattttccatttttctctttttgaattttttccttttcacattactttagtaatttgttcttcatctcttatttttatcacctagacagaaaatatagcaaagcataaatcatttttcaggtcaccatgcttcattcttcttttattggggaaggggcagtggtgatccgggaagaagcatagtgtaaacattttaatacaaatttctctttttttttttttttgagatggagtcttgctctgtctcccaggctggagtgcagtggcacgatctcggctcactgcaacctctacctcccgggttccagtgattctcctgcctcagcctcccgagtagctgggattacaggcatgcaccaccatgcccggctaatttttatatttttagtggagacagggttacaccctattggcctggcaggtctcgaactcctgacctcaggtgatctgcctttctcggcctcccaaagtgttgggattacaggcgtgagccaccacgcccagcccagattcttcttgcattctgttttaaactgctcccattaataagtatttttatttgttttgcttttgacttgtgcccgtgtatctttttaaaaaactattctattttcaaaaagatgccctcccaaatagatacattaaatgcattaaaatattcctttactgtatgctaccttgttctaagctttgttcttaaatttacaaatattaacgtagcatggtccctgattttgaggagcttacattcttgtggaattgtttctcgaaaagattattaatatgaacatacagactagcatcctctccaaaaaccatcatactttgagaattataggtccagtcccacaccttttactggagatacatttggttttgtagctttttttctttttttccattttggagatctatttataaatctaccttattttgttgactactgtatagtatagtataatagtgaagtgaaaagttcagacagccatattcaaatcctggctctttattcactagctctctgattcttaaggatattaccagaatatcttaatatctttagttaaaaacctaaaatgtacattcaaaacttaaaacttttttgaaattagcagtggtctaagataagtggtggtttgagcatattccagccttagtgaggttttgaaaagctgggaactaatggtgtttcttggatcctaattctttactaagggcttgaggccattataggaggattctttccatttcatatttattaacaattttgaatttgcaacactttcatggaagtgttgcctaaagcatgggtccccaatttgcatgtcaaggaccatgctaggaactgggcttcacagcaggaggtgagcagtgggcaagtgagcgttaccgcctgggcgcctctcctgtcagatcagggtggtattagagtcccataggagcatgaaccctattgtgaactgcactggggagggatctaggttgcatgcttcttatgagaatctaatgcctgatgatctgaggtgttacagtttcatcccaaaaccatcatcccttcatgctcttgcctctgtcacttccgccacacccctgtctgtggaaaaattgtcttccacaaaaccagtccctggttccaaaaaggttgggagccactagcctaaagagtagaggaactgtacattcctacatccaacttaattctggcccaggtatgctttcatggtgccttcaagaaaatgcaatatgcagcacctcattattcatacaaataggttctatttgttcagccgaaaaacattaattacatatagcagacaaaaacacagttcttttatatttgctacaatggttggcgtctaacatagtgttttgttgcacacatattagatgcttaataaatgttatctgagagtaatattactccaaacaactccaaaacaaacatttaacagttttgtttggactcttaaattagaggtcagtcagtctgtctatccttccgtcctccttccctccctccctcctttccttttccatcctccccctcacctttcctttttctgtaaacttttccatagcaaatagagtaattccaaatcattttttggaacattcttattagtgttcattcagcttccctttccactgaaatgaatttattgagtacttggagtatttcaaaccctatgctttgtacagagaagacagtgctaaataggaaaccctctcagtgttagagggaaaggaagatgatgtggagggaaggagtctcttactctgaagcattttcaaaatcaacattaaagagtgaaccaacatttacctcctttcttctttcatcttcttatttcatagctagagagctgctgtgcgtttgagacctaagtggtgcaattaaatcaatttctcttcctacagtgctgcaaggacttctggctgacctatattggggcactttgctcttcattagagagccacaaaaacaattcccaagccaattaaattcaacttttaaaaaggaatttcctaatataccatagagttggtgagaaggcaatgaatgggtcccacaagctttcatgtagccttatgggaagagtaaaggttaagctgtgtcatggttgtcaactgggcaaagccactgaaaggcaggactctctattagttgacgtaacaaaatattaataactagtgttatgaattagttgcagtatgagctgaggtatgaaagcatgaattttagacctgacactatccaggagggaaaaaagtggatgtttctgtactgatgttaatcaaaggttaaaaatcaaatgacattttgaggaaaacaaacctaaacaactcattaatggccacacaacttaaattattgtgtgcggtactatgaatacgttgattcactacttccttcccgcttaaaatctccatttctccctactccttagtatatttatagagtaattatatgggaacatagtataggcagtgtagtagtctgctctggctgttagaatgaagtaatacagactgggtggcttcgacaacagatatttatttacttacagttctggaggctactagtccaagatcaaggggccaccatagttagtttctggtgagggctctctttctcacttgcagaatgctaccttcttgctgtgtcctcacatggtctttgttctgtgcatatgtggagagagcgagctttgctgtttctttctatcaaggacaccaatcctattggattagggctctacccttatgaccgaatttaaccttaattaccatcttaaaagccctgtctccaaatgcaatcacaatgggggttagtgctttttttctttttttggcggggggcgcgggggacagagtcttgctctgccacccaggctggagtgcagtggcgcgatctcagctcactgcaagctccgcctcccgggttcacgccattctcctgcctcagcctcccaagtagctgggaccacaggcgcccacaccacgcctggctaattttttgtattttttagtagagacggggtttcactgtgttagccaggatggtctcgatctcctgacctcgtgatccacccgcctcggcctcccaaagtgctgggattacaggcgtgagccaccgcacctggcggggggttagtgctttaatatgtgaatttgcagggtgtcgggggcgggatgggggatacaactgtatcataggagtcttcactttagacagtttctttctgtgaacctcaggataaagaaaattacttttccacaggaataagtttttggagtttacattcctgcctgaggatgttaaaagaagcatctatagttaagttcaatttttttttttctggacacagtaattcaggatgatccaaaaaaccccttgtcccatttttgtcctgcactgaagcaattcagactttctgtatttatttactttgtgtatttactctatatgcttttagtatactaaacttgcatgtttggatcaagatgtctggagagtttgggagtagtttatcttcgaaggcagagttatgcttctcaaacattttggttttagaatctcctttacactcttaaaattttttttatcgaggacccctaagagcttttgtttgtatgagttatttctctagatatttaaaaattaacactaacattttaaaaatatttatttaataacaataaacaccttttacatattaaataaaatttaaaaaaaagagaattattattttccaaaacaaaaggattagtgagatgcattatttttcatttttgcaaatctttttgatgtttggcttaatagaatacaactggattttcagatttgcttctgcattcagtcagttgtaatagcacaagtcatgtagcctgtggaaaactctgctgtacactcatgagagaagtggagtgaaaatggcatataacatattatgatgaaatagttttgactctgaaggcctcctgcaagggtatcagggatttctaggtgtacccatatcacatcttgagaacattaatcttgcgtttttcaggaactggagaggaatagtttaggagtccacagaaggtagaaagtggagctgttggaattgggcagcaagtttcttaagatagatctaggtcacaggaggggaatgttctggccaggcatatttgactggccacattatcagatgccttggttatgtgcggattctaccgtcatttatttcagccctagatggtgctaaagtagagagagacagatttttcttaaactattgcctttaaaaatcatttatttttatccccattttttttgtttatatccaaagggttttcaacaagctgcccctttcccaacaccccagcccctcaacgaaaacataatagagacacatcatttaatttctcagccctttcatgatctcttagactaatcttagttttcataaattaaaggcctacttggctaagttcatttactttttttttctcctacttttcttgatctctggacccaggaatcccagatgatacaaaaccctttgtttcatacctgccctgccatagaatgatctagacctttaagaggactagaatcagccctctttttctgggctttctggggccaggaatgactaggattgatctgctttctcaagctttgccccgggcctaaccaggtcagcctgggaccagcccgtggggtttgactatacctggaacagatggttaatctattggcttgctataatgtaatttccatttggctggcagtagggaaaggaaggtacttcctgtaagctacacactgattttcatccaggtgttcacacataccgggttttatgaaagagagcttgaccctcgcattcctgattagcattttgttagtgtgaaagtaaggtatagacacagagacaggtataatcacaaaatggttggagtcttttattgtgtccttttcttagagcaaatttaatagaggagtttgattagcacctaagacttgcttaaaactgagttactaattctttttccattaataattgctacctctaccctccttctcccacgtttctcagaaacccagacatccctgaggccatttaaagtcctgtttatgccgtagaatacaatgacgtacaaaaggacattcactccctgcatgttggcttcccttatatgaacataatatgtggccaaataatatgttgccatatataaaaatgtgtggttctctcatttctaggattttcatgtgttatcttggcttttcatctgaaagttttctcttgtccatttgtatcttggtattttctttttcaattaaaatattaatttctaagaagcaaacaaatctatgtcttagtttatgtatactaattcaagttttgttttttactccagatgtgttgatagaggttaatataagaaatgtttgtgttggcataatgcaaaggttatttttgattctgaacccatagcagtttctaaccggtgttcgtcagtttgtgcttgcttttatccttgaggttaaggattgctcaccaagcctttgattactaggtacattgcagaataaataaaatcgttgctagtgtatactctgtattaatctgtccacagcagcattgtcagtgatctcaaggttctctgtagacattagtattgggttatggcatgctaaaatagagataattgagactataaagttccaagttgaagttatcaataacaaccctaaaactatcttccttttctttccttctaaaataagacatatggtaatctgtgatcagatgtaaacatgtacatcctgaaatgtaattataaggtcagctggcctgagctagaattctattaatatgaaagtagatgatatacctacccattctaacccattcattcaaaataccttgaaatacttactgacattatagaaatttagcccttcactctgctgatgtttatagttaagtgtcagaaatacttttatacagaagaccttgtatggttcctttgtgtgagtggacagaatttgtggagcaaagacctggaatccagcatatgagaatgtgcaataattgttcaaatgaataagcttctcagatttggcctttgtataattaaaatcagagtgctgaagtgttgcatattcctcattcttctcattcttgcaagtctctctctctctctctctctatatatatatatacatatatacatatatacatatatacacatatatacatatatacacatatatacatatatacacatatatacatatatacacatatatatacatatatatatacatatatatatacacatatatatatatatatatatatattttttttttttttttttttttttttttgagacagagtcttgctctgtcgcccaggctggagtgcagtggcacgatctcggctcactgcaagctccgcctcctgggttcatgccattctcctgcctcggcctccggagtagctgggactaccggcgcctgccaccacgcccggctaattttttgtatttttagtagagacggggtttcaccgtgttagccaggatggtctccatctcctgacctcgtgatccgcctgcctcggcctcccaaagtgctgggattacaggcgtgagccaccgcgcccggcctgcaattatgtttttaaaacttaaagcaaaacaaaaaatgacccttctatccctcttttcatacccatattttggcaaccactgatatgctttctgatattataggtaagtttatgttttctagaattgtatataaattgaattatatagattttatataattttatgtaaatggaatcatacagtgctcttttttggcctgacttctttgactcagcatactggtttcttttttaaaaattggtgaatagggctggacgcggtggctcatgcctgtaaacccagcactttgggaggccaaggtgggcagatcacttgaggccagttgttcgagaccagcctggccaacaaggcgatagcccatctctactaaaaatacaaaaattagctggatgtggtgatgcacgcctgtagtcccagctacttgggaggctgagtcaggagaatcacttgaacccaggaggcagaggttgtagtgagccgagattgtgccactgcactccagcctggctgggcaacagagtgagactccatctcaaaaaagaaaaagaaaaaaattggtgaatagtattccactgtacagatctaccataattgtttattcactaattcaccaattgatggacatttgttttcagcttggggctattacaaataaagctgctatgaacactctagtataagtctttgtatagacattcagttttgtttctctggggtaaattcccataagtcgattggctgggtcatctggtactgtaagttttaactttttaagaaactgctaaactatctttcaaactgtttgtgccatttcacatttccatcagtggtatatgacaatgctgattaatttagtaaaataatctttttaattttagccaatccagtagatgtggttacttgggtttttatttgcatttccctgatgacttctgatgttgactatctttgtgtagggacaaggagaagtgggttttttggccattagttcaccttttgtgaaatggctgtttaaatcttttgcccattcctttacattggattatttgtcatcttagtgagtggtaagaatacttcaaatattctgaatacaggcttatacaaagatatatacataaatatattacacaaatgtatctaatagttctctctatataaaaacactaaagatgttgctctatcattttctagtttccagagttttttttattaagaaatccatggtaccagcctggccaacatggtgaaaccctgtctctgccaaaaatacaaaaaattagccacgtgtagtggcgcacgcctgtagtcgcaccaactccagaggctgaggcaggagaatcacttgagccctggaggcggaggttgcagtgagcagaaattatgccacttcactccagcctgggcgactgcgtgagactccatctcaaagaaatccatggtaatgtgaattgttaccctgtatgtaatatattgaatttttttcctagctgattttgagtatttctttacttttggtttgcagcattttgtgtcttggttttctatgagtttattcctttttgaattggtacattgatgtcttttaccgtatttgtgaagtttgaggtgattgtttcttcagataatttttctgccccaatatttttctccagtcattctgggactccgactgcatatgttttagtccttttgatattgccctacatgtccttgaggcgctgtttattttttcctcaatctttcttttctctgtgttcctcaaattgaatcatttctgttaatctttaagttcactgacttttttttctttgtcatcaccattctgctcttcaggccattcagtgaatttttcttttaagaatttttgttgtctgtttaaaaattttattttggtactttttatagtttctatttctctgctgagaatttttactttcttgtttatttcaatatgttcttctttacctcgtggagcataattataataaccgctttaaagtattcaataattccatcatctggtgattgcgttttccattgaggattgtttacattttcttggtcctttgtatttcaagtagttgtggcttgcatcctggacattatgggtgttatattgtgtagactcttttatcctctgaagaatgttgatatttttgttttggctggcgatcaccctgctcaggttcagaccttagttctgtttcaccatctgtggccagtggctccaatgttagtttagttctcctagcctttgtatggtaggcagaataatggtctccaaagatgtccatttcctaatccctgaagccttggtaatattttaggttacataatgaagaggagttaggttgcaattagagttgcggttgctaatcagctgaccttaaaataaagaggttatcctggattatctagttaggcccagtgtagtcataaggtttttaaaagtgagaaagtgaggcagaagagtcagtatcagagtgacaaagtgtgagaaagattcagcctgcacttgtggctttgatgatgggaggggggcccaagctaaggaatgtaagcagtttctagaagctgaaaaacagaaagaaacggattctctccagaacttccagaaggaatacagcactgttgctatcttgattttagcccagtgagacccattgtagacttctgacctccagaatcttaagataatttgtgttgttttaagccgtcaagcttgaggttaatttgttatagcagcaatagaaactaatagactttgctatattggtttgagtctgttctgcacatatgtagctcagtgattattctgtaacttttgcaggttcatgcacagatttaagggatcctcttttctgattctctcccctctgggatttcccccatgctgtatagcctacagggtctacttctggtttctctggatagaaatatgggactcattggaattttacctgttggcatttccacaccactctgtgaccaaagcctgccttcagggcaaagtagagaaaggaaatggaacaatattaaaacagaaactcacccctgtgtgttttgcttcagcaagtttttgaccctataacctattataaagtgaaatgaaaatgtggacacctgtgaagcggtccgagtgcaaaatttgtctagactttcaatttttttccccagtcttttagagttgtctcctacctaattcaacaacaattttagtggcttgcctttttgagtttttccagtgatttcagctgatcttctcagaattgctttcttcatctattttgcaagttaattgaattacctaatagctataccaagcataactcgaaatgccacagctgaacttgggcaagctcctaactccactaagtacagaagtggagccgtacagccatgaatgtcaggcatgttgtggggactagttgtattagttttctattgccaccataacaaattaccacaaacttaagcaatatagtacaaatttatcttaaagttattggcaggtcagaagcctgatacggatctcattgggctaaaacgaaggagttggcagggctgtgtgttcctttctgtaggctctgggcaggatccatttcctgcacttttttggcttttggaggtcgtccacattccttggctcctggccctgctccttcatcttcaaagctaccaaaggtaagtcatgtcctttttcattatttcactctgatagcctcttttgcttttttttttttttttttttttttgagacggagtctcactctgtcaccaggctggagttcactggcacgatctcggctcactgcaatatctgcctcctaggttcaagcgattctcctgcctcagccttccgagtagggattacaggcaccggccaccatgcccagctaatttttgtatttttaatagagacgaggtttcaccatgttggccaggatggtcttgatctcttgacttcatgatccgcttgccttggcctcccaacctcttctgccttttaaggacccctgtgattgtattgggccgtcctggataatctttccatctcaaggtctgtaaccgtgtccctagggattaggacatggacattttgggggctgggggaggattagtctgttgaccataccagttaatcttatttacagaggatgtggagagtaatgattaatatgttgagctgatgaagtagacaagtggctgctgtatgtagaagtaatgttggaacaaataatacgtcccagaatagtttctgtaaggctgattttactctgaaattttaattaatttatagttaatataactacctctgtattttgttgtagtcttttgtgggtagagttgaggaagagataggaatgggattattttgacatggctcatgatcaccaaaatgtgatccttggtcagtttacctaaatatcaatgtaattatgtttatctaatttaataatttgctgaaatcttccttattttttactttttatgaagcttttagccatttatattagatggtgatttttaaaacaacttttgaagacttaagtgacattttagtagatatgattgatttaatatgattttagttttagacttttaaaatttgatttagctaaatccatcctctatagctaattctccatatctgaccaaagttgagtatctgaggattttctaaacttgggaagatctaaaatttttgattatgaaaatttcttgtgcatttcaaattataagtcttattcatggctctaatgtgagtaatagtactaaataatattcacatgtatatttcaacacattttaaattcagccaactacttttaaaatttatctttttttttttttttttttttttgagaccaagtctcactcttttgcccaggctggagtgcaatggtgtgatcttggctcaccacaacctctgcctcctgggttcaagtgattctcttgcctcagcctcccgagtagctgggattacaggcatgtaccaccacacctggctaatttttgttttttagtagagatggggtttcaccatgttggccaggctggtctcgaactcctgacctcaggtgatccacctgccttggcctcccaaagtgctgagattacaggcgtgagccaccgtgcctggccaaaatttatcttaattcagactttacaattgactttattaaataaatatttttaagtagaagaaatgtttactgactaatatatgaatcataattaaaattgaacttcagttacgctaacaagtccactgaaacgtagctggagtaactaactgcagcaaaacttggttcaatgtagaaatctaaaacttaaagcaacacatgcaatatgaattgctttaaatctttagttgttaattgaaatgcattttaggcaaattggtcacattctagggtgtgggttggcgggtttcattctctaccttttcagccaggatacagttctgtgtcccaacaagtatagtgtagtcagtgacttttccttttatgatgaccataaatctcttcagactagtgtttgtaagaagacgggaaaatagtaaaatatgttagaattatttgcaccaaaaaccaaattttaaaaattagtagttttatcacctaggcagaaaacttttctattagaaattatacagtctctcatctcaaataccatgttttactgttctaagaatcaaatagtgctatagtgaaaaaaagagagtagatagtttttttctgaaactatctactatactgtataacatgagaaatttctcaaaaaatatgttttttttttccataatcatgtctggtctcttttttgagaccaagatgaaaccatgttgcttggtcttcaaccatcagcttatctgttctctaatgatttttgttgttctggtttggtcttaaagttttgagaattcattttattataaatgtgaaagttcatttaaatattgtgttctttttgttcctgtaaaggaaaaagaatatctagaataaagtaataacttgtaccatgttgtagacttgcttcagttgatgaatgcttctcctattatttgaaaaggattcacctttcaaaaacaaaacaaaaaaaaactgtctaccatgcaaaaacaaatgactttctgaggttgcttaaccatttcctgtaagtatgggaaagcggttattttcaaaatcaccagacagaatttgggtagaactaaacttagctgagcagttctgtgggttaaactcacttattgtttcacttctatcttcctctagagaagttaaaatttaaaaattaaaaaaagaaatctgcttggttcctgtcatttttactaactagctgagtatctttggacagaagctaattgttttttttataaatgtaataggattagagattctctttaaaaagcttacagttttttaaaatagcaatagctattttttaaaaaagcttctggtttttaaaaatagcaaaacaaagtgtcagcagcatgggcactgtgctgtacgttcatccctcagtatcctctgaggattggttccaggatcccctcccccctaccaaaatccaccaatattcaatccctgtatatttgcatataaccagtttacacgaatcatcccatttactttaaattatctttagattacttacaaaacataatacaatgtaaatactatgtaaattatactgtattatattattatttttgattttttcaatttttttaaatctgccattcagtctatagatctggaacctgtagatacagactaactgtatttggataatttcataattttaatgagagaaaggggagaggggaaagcctggtttactgcccatgatgaagtagtaatacagtaaatttagttgagacatcagccaaccttttttgaatacctactaagtacctggctgagagagttgtagaaaccacagtgtcaatgtgtttctacacatttctataattgttggagttgtgtttatctctagaatttgtggtactatcctaaacctccatgcaactctttagttgtgatgtagaggtggctctgtgaccccccagccttctccagaggctatgtagacatgaagcgtttagttggaactagggacttgatttgacattcctggacttatacccaaagtctaaaagggtgttaaaggggtatacgtactgcagtcaaaaaaatggtgggtttggaacttggctctgctacttaatagcaagttcttaaacctctttgtttctcacttcagctgtaaaatgtgaggattaaatgttaactaatgtgtgtaaaatgctaattaatatagacagctgataattttttgagtacacactgtgtgctagactgtgttctaaatgcttttacatatcatttaattcgtataactcaatgagatagataatattattatccccatcttataaatgagcaaactgagcttggaaagatgaagtaacttgcttaaggctacacaggaagtggcagagcagtctggttccagagatacccttttttctttttcttttctttattctttttttttttttttcaggctagtcaagtgaagcaatgagggtggagaaggaacaaataagcctgtaactggttgtgatccattagttgtaaataccactgcactgggaccaacttccagagatattcttaattactctgctgtgccgtctctttattgcttagctgggtattagcatatgatttgccctcagtgaatgttggcttttatcaacattgtcagtggtggtagtgacgatgatgaacttggttttactttttcagtgtctaacctggtcccgtgctaggaccccaggcagagcttcctatgaagtcacgtacaacaaggcctttgggcttaagagaaaaagctcacagctgcacagagggaggagtttttatataaagaatacaaaatgttctgaataccaagtgtttcattctctccttatgtttctgagttgaaatttgaagtaatcatgagacactgcatgtgttcccatttcaaagatgccacagaatcataaaactagtatgtagcatataatttcaattttgtcttaggggataaattagtctaagaatagtataccaaaacattaattgtgataatagtgtagtgatcaatttatgaatgaaatgatcctctattactgcatggcacatcataaaacttaatggcttaaggcaacaaccattttctttgctcatgattttttaggtcaacagtttggattatattctgccgggtgtttcctctgctgatcttgcatgaggtcactcttgtagcagtcatcatctggcagcttgacttggagccggatggtctaagatagtttcactcatatctgccagttgatgatggcttttgactgggtttggctttccatgtggttcctcgtccccagggagcctagcttagatttcttctcatggggctctccagtagtaaaagataaatgttgaaagctacaaggcctcttaaagcctaggattggacattccacagtgtcatttctgctgcattccattgattaaagcaagttacaaggctggattcagtggcgatagaaacttcacctaataattggagattaatagcaaattcctttttaaaaaagaatgttttgtttattaattttttaaattgacacattataattgtacatatttatggggtataattccatgttttgatacatatctgtgctatataatgatccagtaaggtagtatattgatcacccatgcatttatcatttgcttgcagtgagaacattcaaaagtttctattctagccattttgtaatatgcaatattttactgttaaacacagtcaccctgctgtgcaatagaacaccagaatctcttccacttatctaattgtaactttttatcctttgaccaacctctccccatcttctcccttgtcccctccccagtctttggtaactactgttctactctctgctcttctatgattgatatcaacttttttttttttttaagattctacatttgagtgagatcatgtggtatttgtctttctgtgtctgacttttaatagcagattgtatcgtgatatccttgtctcctgatttcactgtcgtggatcaattctaaaacatcctaatagcattgatagttttttgttaatttattaagatcttggcagatgaaaacatgatctgtacatgtttgagaggtttatttctattttttaatataaaaataaaatatagataatataaatacccaacataccgacaactccacctctcagaaatgaccagttaaccttcttattttcagtgtatccaactggatatttatttaaatgtttataacctgcttttctctctttatattttgaatacttttctatgtttaaaataggtataaataattttttgtctgcataatatcttattcagtatgaatatacctatcccttgttgttttaggtttttctctttttttgctatgtaaactatactgctgtaaacattcttatatgtatatctctggcacttactccaaggaaaaaatcctactatgaagttacttggtcaaataagtattttggacttttgatatgtattgacgaggcatgattttaagaattctctggtttaaacttattagtgagtataatgttgcagagctgaattcattatgtttgagatcatgtgaaagggaaatttctgaaagctaatttgaaatagcaaccattaagaaaaatatatttctttagcatttcatttacaaatcaaaatgtataaacttagttgctaatattttcttgtttttctggtgttgcagttttttgttgatacataatagttatacatatttttagaattgatgtgacattttgatacatgcatacagtgtgtaatgatcaaatcagggcagttggaatatccatcacctcaaacatttatcttttctttatgttgggaacattccaattcttctatctattttgcactgtacagtaaattattgttaatgggtatgaaaataaagttagaaggagtaagatctagcattcgatagtacagtagtaggttgtctgtagctaacattgtcttagtgaccaaagctttcattttgcatttgggtccactaattagagttcttcatctttctttttacatgtggatatgtgttgcctttcattcatctgtaatttccaggtccttaaaaaaaaaaagtagattgagaatgcaggcattttgaagactgggtgcaaaaatcctagaattctgcctcccaaccccaacccccaaccccaaggtattaggtttttcttgcgcatacctaatttggcagcagtgttattttgaggactcatttttgtaggatctttctgatacataactcagttttcataaaaacaatttttatatttttcatttaatgacacaatatttaattattataaaaccataattacaagtttaactaacataaatcagcttgagaacaaacaactaattcttagagtagagtgcctctggtgagagcatatgtgcttggaccttctggagagtagccctttagttgtgggcattcattgagcacttagcatctgaaaatgtcttacagagagaatggaagacattggttaatttggaggtttgttaagtcaacatgggttaaaagaatttctaccttgtttgttgtgatagtcatttttcttcttttactgaaggcaatgacttcttcctcattaaatttttttaggttttagattttatgattaagatttgtattatattatagttatttatttggtcctgtccttgatctttttcacagcaggattctttatgtgctacggtttttgtttctgtttgcaattgtccttggtcattggcattctctagtggaatttctccttttcaactaaaatgttctcctggatagatatttaaaacaatgtgcaaaattaaaccagaagtggctcatcttttctgcttcttttctttagcactgtaatgttgattttttgcttataggactatagaactgcacagctgcgattagacttcataaatataacgcagtagagaatttgaaagtgatggaggccaagtgtggtggctcacacctgtaattcaagcactttgggaggcagaagtgggaggattgcatgagacgaggagtttaataccagcctgggcaacatagtgagaccctatctctacaaaaatttttttaaaaattagcttaatatggtggcacatgcctgtagtcccacctagtcaggaggatgaggtgggaggattgcttgagcctgggagtttgaagttgcagtgagctataattgtgccattgcactccaacctgggtcacagagtgagactctgtcttacatatatttgtgtgtgtgtgtgtgtgtgtgtgtgtgtgtgtgtgtgtgtgtgtagtgaagagaaacctggccctaccagtgatggagtcctggctttaccacttagtatatgtcggaacctcagttttctcaaaggtaaaatgtggataataactgccctgtctacttatattattgtaggagtcaaataagataagtgggtcacaacacttttcaaactatgaagtgctttattaataaagagctcattgctattatattaaataattaggttagaagcttcaaaatcataagacaataaacgtgtctttaacttttcagcaaagcacactagtctttctctttaagattcattagcataatttccccctcatgccttaaaaatgatgtttcattgtcattcacagcacacattagtaggtaaattcttaaaatatgaaaagtccagaaaccttgttttgcctttaacaccaaaaataccaaatcacttacgtaagcaacaactctggcctcttgacgtcttttagggtcagctggaacaatgtccgtggagaaccctcaggtatagtggaactttagatattatctgtttcacagagattttgacacacagattttacattttaagtcatctgacttctaagacatttgtcaaatggctgccttgatataaaaacactataactgctcccaaaacatccctaagaattaagtgtctctaaaggccatgttcatgtactatactgcatttacacagtaaaactcaacgtactggatgacagctacaatttgtagcctggctattattattattttttttttttggtagaagctgggtctcactgtgttgtccagagtggtcttaaactcttggcctcaagtgatcctcctgcctcagcctcccaaagtgctgagattacaggtatgaaccactgtgcctggcgtcttcactatattttatgtcttctaaaccataattgacttgaattatcaaccagctttgaggaaagaagaggaaaagtagtaagtatataaaaagtagttctcaagaatcagtgtctagtagaactgaaaggcagtgactcagatcccatagtcactgaaatactactaagtcctcctgatttaagatccagccccacagcaggtattagaaggaccttgttaaccttatagacagtgtatgaattttatcttattccaagcctccagtaaacctggattcagcccttgaagagtttatgcatggacatggaggtaatttttgtttatacttcattttaatatattagattattgctactttcatttcaacatttatggcaggtttcttccctgctaggcaccaggaatacaaagatgaatgaggttatgaacctctccttggaggaattattcatatttggagcaaaatttataattgcagtttacttatgcagaaattctttttttctacagcataaaccgggccttgagagtttcctaaaccttctatcctcaacttctaattcttgaacagcaaaaagttaccaggattgaaatgtatccgttattctagaaaagtaaatgtagagcaggttttggaactcaatatttcatcctaaatgtgaaagactgtataggcaaatagtgtgcataatttcctttttccagggttgaggggctgccagtggtgtgtagtggggagagagtgaagtgactcataattctggaatgattgttttgatctcctcctgtagcctctgtaggatactggcagggcaaccagcataattaacactacacagtctaattataaacaaaactctatgtacagtggctaccaagaagcaagcctgtactggataatcccccaagttggcaggattacttttagaatgattattagatagtgtcgtttactataaatcaagttgtttttctttgattgtccagggacttaccctggggggaaagtgaatataataatatttgtggaagtcttctgggttatttttttcagggcccatttaaggatttctttattgcagttcttataacctttttgtcttaagagaacatttgtacatcttactatgtatggcgtactcttttagggagagtaggaaaattggtcagagtaagacatttgttccaataatagttggattggtttttttaaaggtgaaagaaactaggaatttgaaaagattacattggaccggtataataaataaagagggagaaaaaaagcctatgggctgcagagaagaggatgggataaggggacaaagtgaagtggctatagctgccatgcatgcttgagagaaaccaagatgtttgtaacatgtgtatggtctcacatgctgttcagaggcagagcaggcactgtgcgtggttgtatgtgctttagggatttgtggaagcatggctgagagctgaggaccaatttagtttgtttatatacagggccactgggtctcttagatttagaacaaagatcctagctgtggagatttgtttcacatagctgtgacctgaacaactgcagaatggttatatttatgcaaaatgagcctcagaattgtgattacctcaaatgaagtaagaattttaaatcagatacttcaaaatgagggctttttttcctatccagaaaaactcagttaaaatttaagtggacacttaaaaggagtttccctttttaagaaagaaatacagaaatccaaatacaaaaatgaatgttaagtagttttttgcttaagaatgcttgctttttttttttttaacttttgatgagctcataagaagtttcctttaaatagcagttctgtagttcattttaaatatttggatttacaaagaaaatttccctagctttttacttgaaaggagagggagaacatactgtatttttctaaatttgggcataactggtattattactggctaaataattttgtgtttgccagatagtcttgaaagagggacagatgtaagacggctgggcttgttaaaagatctctgtctctagcctgtgacccagttctgatttgtccctttaaattacctaactagacttttgagaagtgaaaaattggttttggagatgcaccaggacaatggtatgtgtggatttttgggccagtttctaggagaatatgagttagagccgtccacactactttcctgccctctagcagcattttttgcattatttttcagttgtttatctggtttctattttgttgatttttgccctgttttttttttattattttttctacttaggtttaatttggtattcttttctaggttcttagggtggaaatgtcgttatttttaaaccttttcccaatataggcatttaaagcaataaattttcttgaattttgatatattatgtttttattattatttatttcaaatattttatatattccttgtggtttcttctttgacttatggattacttaaagtcttttgtttttattttccaaatatctagggattgtttacctaatttactaattgattttttaattgtttccattgtgtttagagaacaaagtctctaaaaagcatatttcagtcttttgaagttgattgtgatttattttattttattttgctttattccatcttggtgaatgtttcatatgtatttctgcagttgtttgattttatattctgtgaatgtcaggtcaaattagttaatagtattgttccgatcttccgtgaccttacttatttgttgtctacttgttctatcagttatgaagagaaaggatatggttgtggatgtttttgtttgttctattcttcataaaaaacttctttttgaaacactgttattaggtatacatatttaagattgatatcctgctgaatttctccttttatcatcataaaatattcttctttgttaatctatttgtgtctaaatttaaaatgcatctcttacagacagtgtatatagttgtttcttgctgttttgtccccattgtgacagtctctgttacaatgtttaatccatttacagttaatgcataggtcaggtttaagtctaccatgttgccactgttttcatttgttccttttgtttttgtttatctgtttctcctttattcattttttttggattaagtgggcaattttagtatttcattttattttctctattggattcttaactatgcatctttttaaaatcactttttcagtgtttcttctaggattaataatatgcatcattaagtctgtgtatagtcagtattgtaccatttcacattctatacctgacccttcttcctttctgcttaatttctcttactcaacttctgtattctctgtgcttttgttgtcttttattttttggttttaagcatacagtttttaaagatagtcttttaaggaaattataagaagaataaagaatgtacaccttttattttaacatgtattatttctggtattctctccttcctgaagatctgagtttccgtctggtagtagttcccttcatcctgaagaacctcctttaaaatttcttgtagtatacatctacttgaggaaaatgtgttctaaatgaattctgtaagctgtcatttatttgaaaatgtcttttactcttgattttgaagcatattttcactgtatgtgcaaagttgagtttagaattttctttgtcttccaactctttaaaaatgctctatcatcttcaggcctccaccgttgacatgagaagttagtgtatgtactgttgttcatctgtatgtagcattgtttccaggttctcttaaaggttttctttttatctttagttttaagcagttttgaccatgatgtgcttaagacattattatttgtgtgtgtgtgtgtgtgtgtgtgtgtgtgtgtgtgtgtatttatctttttgggggtttgctgaacattttggatctggtaagtggtgtttttcatcaaacttaataatattttaactattatttcttcagatattttcttctgctgcattctcacactccttctgtggctcctgttagatacatgttagactgtctgatactgtcccccagatccctgatgctgtgtttatttttcttcaatcctttgtctcattgttcttcaaattggtaatttctaatgatctgtcaagtttatggactctttcttttgctgtctccaatctgccattaagtccatttagtaactttttcattttatttattgaacctttttctcctagatttttcttttttccctctcatttagttcttttttagtcttgatttccccacggagagtctcatctattcacatattctcattttttcctttttaaaatacatcttcctgcttaatgatggggatacaattgaaaaataataaaacacgtcttcttcagggattcttttttatttataatggctactctaaagactcactaaatacaatgcaatatctggaccaccttaagattgctttctaatgattttgtttacttagggttcacattttcttgtttcattaaatgtctagtaattttttattacatattgaatagtgtcaatggcacatggtagagatgctgaattaaaaaaaactctgtaaaatgttgatttttctctctctgtctctgtagacagcttagttactggctgatcaccttgtgtaggcttatttttaaggcagatctgtggaaagcctaaggtgtttatcaggctcctctaacttagtgagactcatccttaaatactttttcccctgtggattttattagggcttggttttaggctttgttactatggatctagagtaggtcttattctagggtgtcacctttacttctacactgaggcctttctagtgtttcaagctgatgcctagggtgttatgagttctctttgctctggctgggttgacctgccactacttccctgcactgcttgacctctagtatttctgttctgtcttaaccttattgcagctactttcttctacacctcatgtcctaaattggctaaggactctcagaaaaccttgtgcaaacttctgtgactcccctctgcacgtgccccccttcaccagcactgctctgcttagaccctagcttgctgaactacagttgggaaattgtccccagagaaccagagtgattgtgggctcacctgttccttcactcagaggtcacactctgttagctagtatgtgcaaacaggtgtattgttttgtctagtttaatagttgtttatgagaggaatgataatctggtaccaattactctgttatattgaaagttgaagtctctcccagtatgctcatggactgaatcattgctcgctgatcttctcgcctcccaccctcagtcatccatttacttttctcttcacaagggagacaaagtcagggtgaggggcagcagaagaaagaccttacttggatcttgctccaatgtcatgaccttgggcctctgaactagaaaattaaaggtgttgtgaaaaagcacaatatactaggggtaaagtagtaatgcatgcgggactttacatgttcatattttatgccactgcttatacattgaggtgttacacaaacaggtgtcaggaaaagggacgacttagatacatcttcaaaacttgtttgctgttaatgactgcccttcagattctggtgagataagatacatctaaacttgtaacttctcatgagcactgtaattaacaggaagagattttctttgagtatgggtttagcgggggttgggtagtgttttgtccatttggacctacccagaaaaaaatcaccttttttttgttctaaattctagtgtttttctttctttttaagcttaaacttaaaaaaaatagaattttttttgatagaagagtattctcattagggaaatagttactttatatgatacttagtcatcactttggaaatttatctagaaaatattttaagtgctgtcccatacttggaacttatagttctatataaatatgtcataggggactcagaagaatattagacttttttccttgttactattctctaaaaaataacagtataacaactatttatatagcatttacaatggattggatattataagtagtctagagatgatttaaagtatgtgggaggatatgcaaagattagatgcaaatattacagcattctgtagaagggacttgagcatttctggattttggtttcacagggagccctggaatgaatcccccacagatgcctagggacagctgtacatcctattacattttctcagaaaatgtgatggcagcttaaagctttaatccttctaaagtctgtgagaagtttgcttcttttagttcaagttgctgttaatgttgtttgtcatggcttcgctttttgtcctgtcttctaaattgtatccctcaattgatgacttgctctcttgccggtagcctctatgcactgtaaatttgccttctcaccacatcctccctatatgtttaaccctgtctctgtctcctacctctgctttctctaccttttataaacattttgtttaacttttattgtggtaaaatacacataacacttctcttcttttagacctgggctggtaagaagtgctgaagatgttttttagagatttgtggtatgacaaattccactggggtttctgaccttctcagtcatgcttgtcttggggtcaccactccttggccctctcctatggcacctgtccctcattctgctcaagcccctatgccttcccaacaacttgcctttagctctgggcagatgtctttgcttgcacttgtcacagagaacatgaaggctctctgctgttttgtgcccatgcacatgcctcttctctgtctttacctcctgtcctccaggcttggagggagagcacctagctcccatcattttcttgtacactctccctgtccctctggatgctacgccagcattttccctcccctactccttcacctccacattttgtctttctttactgttcctttcctgcagaaatacatgcccaagttgttcccatcttaaacacagacaaatgaaaaacaaaaggatttaagttttgtctataccacattttcctttagtttatccctatgttttttccttgataaactactacataccttcaaagaatagtctgcagtccttgttttcttttgttaactttccatttcttctttgggcccctggaatcaggcttctactctcactattaaagtcactggttccctggttaccaaatgtaagggtctctctaggcctcattttacttgacctttctaaaatatttaatgctggccactttcatctttatgaaagctttaggtttctgggatgccactcctgattttcctacctttggtccatttcttctcctttgctgaccttcttcctctggccacccagctcttaaatgctgatcctccctgagtctccctttcgatagtctcatttatctgcatggttttaatgaccatatctgcacaggtgattcggaaacctgaatcttccacccagatcactctcttgagctctaaacccacgtaacataatccttttaacaattctacaaaatagcactgtttcccacatttataggtgaggaaattgaggctaagaaaggtaacctgtttgaagtcagtggaaaagccaggattttaacgtctacctaaaatcaggcctttaactctattaatcaaacatctccacctggttatctgacagatatatcctacactgaatgccatctcataatcctgttctccttccttgcctcaaaaaaaattagaaaatgtgaaagactatattctcaatctcagtgaatgacattccttcttttcagttatacaagttggaatgtaaagggaattgacatagacttttctctgtctcctaccctgcaggtccatctagcccgaggtagtatcagttcttgtgcatctacctttttgacgtgacttgtaatcataccctcctctttattctcactgctactgacatagttaagaactttatcttgactgttattgccattatagtgacagtctaactcactgcttctcacattatctgagctgaagaaccagggtttattgtttctgtttttttaatttttaatctgttgcagaaattttgtagcatataaaaaaattaattagaaaaatgaaatgaaaaaagacatacaaaaatagctcagttttatacattattaaattcaatacacataaaaattactctgtcaaattgtcataaaagtttttgggtactaatagtctatgtatatcctgtcccagatgggtcacacttttgcacattggcactggtccacaaacaacattgaggaatgctagttcacagtatctgatgaaaagaaatgtcttcagttctcttagattataaccacatgggcctatgttatttaaaactgaaacatttcagtagaaggttctttgctttgacttatagatagcttctatatgtggatttaagaggttttagaaaattccctgtttctttaggatcccttctttcagtaggaataaatcccatcgagcaaggggtaatcatgtgttatgttacaatttaatgccaaaatcaaagtgtactgacttaagaatcaaatcaacattttcttaaataggcttgaagtaccttcatgtatcttcatgggatacctgtaataaaagtgattttccctgatttgatatatttaacttgatatgattgtgcatacaaaaaaaaaactgtgcttctatattgcacagtgaaatatagcaaatgggttgatgtgatctccatttctgaaagattaaaattctacgttggtattattctgactgggagtgaaataataaaagtaagttatttggatttaggcaggcatctgactaagcccttgtcagaagatttgaaattaatgacatgcagacaggagataccaaattgtcaaactgtagaatatctcttggctttaaatggcatggcagaagaataaaaaaacacagcaacaaagttctaaggggacagaattgagagattggaatgctctaaatattaagctgagattgtacctggagttagttcagaaatatagtaaataaaaccatgctgtacagaacccattgttgtctgcagtaggcctgacacagaacaaaacacatggggcaaatgcctgagagcataatcttcccatgtgtggtaaaaaagtcaaaaaaggcctttttagacatttttaaattaaaaaaaaaaattaagctagtctacagcagtgtgccaggaaccaaaaaactactacagaaactttctaatcattaagagttttaaaagcaattttaaaaaattgaatacagcaatatttgctctgttaatgaagtgtatgacccaaaacactattaactatcaaaacagaacatactttttttttttaacaagaaattggggcactataggaagtttaggagattatattcccaaaagcagtatgttagaacccttcttctttcatagtagatgggtagatggcagaatgctaaactcatacctagaaaatgattagaagttttattcaaataaaaattttaaagtagcataacttgtatacagttcaggttggagaggagtcaggaaaaggtaacctcattgtgatccatatgctccccaaagcagaaatgggtgaagtgaaatgaaaagaaagtttattttttaaaggtaataaagacaaaggaaaaacaaaaaaacataacttttcttaatttgtgttgtagcaagttaagctgaggtacggaataccaggtggatgggcatgggaaagggagatgatgacactgcaagcagagggaagagaaaagaaaaagagacatgtggaggatagcgtggaatagctgcctggcctgtgctcaaaatagtaagcagtttgggatggccagagcatactcaggaatggtatttagtgctggctgggatctgaccatggaagatgcttataccagtgcctctcaaacttaagtgcacgtgagcacccgaggatttgttaaaattcgtattctaggtggagacttcagaggctgcgtttctaacaagctgcaatgtgatgcaaatgctgcagggtcacaggccacactgaacagcaaaactgcaaattttatcctaatatttatcaataatatgttttatggatgaagagtttccaccattacagtgtttgttgaatagcacaaaatacatagcatttatcttaagctagatattcagtagttttttgtaagctttgctctcctgatggtgaaataatactcttagcaacttcattgccaggtatgaaataaataattcagggctctcatcttttattgaattagtttgagtagagggatgcaatataatgaaaagagcataaacttttgaatcaaatttttagacctgtgctttaatatcagttttatgactaaatagctgtgtgactttatgaagacgaattaatctatttctctttttctattttctcatgtctaaaatagaatacttgccattttataggattgttgtaagggttagaaatgataggtataaagtatcttcccttgtagggaagattagtggaggtttcaatttgataacttttgagatcccttaaaaactaaaattgtatgaattttaaataaaaaacattgaacgatctaatcctaggaagtactgatatatgggggattatcgacccttctacttctagagtcttttttctcagtgattttggcaaatcggaaggtgtggtttgttgtagtttgtaaaagctcccactgagatccactaacactcatggtgtgcagtatggttgtttcccatggaaatatgttgtacttctgaaagccatggaagcatgaaaaacagattgaattataattttatctgacttttattgtcttttgatctttttaaaaatcatttcttgcttatggaaatttcccatataatttgctgcttcccatttgctgtgggacagaaacattcctctttcaggggaaaacaataacccatcctgttgcttagccatactcaatcttagaaatgggcataccagcttgtggtgctccctagagagaatgagactcagggatgagacccacaaataccttggaagcagatttgaggcctgttggacagaaattctgggattgcagtgcccaaaccctagaaggggaaccgtggactgtaggtgggcacatccctttgatcctactgactcctcgcctggtggggacagacatagtcagaggaatgccaaaacagggccctctcaagcccagggcagggtcccaggttgtggggcaggagtatattaaggaaattagtatattatctcagctaactttttaaaaatataatagcctgtttatttagctttcttgtttcataactgtggtatacttttatttatgttttagtttttaatggatgactcaatggtataaacatcttatttaattcagtagctctgagatggaaataagtcttagtgacttaaaaaaattcttagtttaaatgtggtctaggtagaagacatgttattaatattatgagcttttttttttctaactctgtgccttgttcttatgttttggttttttagatcggcttcagctccccaggaatatgattgaaaacagcatgtttgaggaagaaccagatgtggtggatttagccaaagagccttgtttacatcctctagagcctgatgaggtggaatatgagccccggggttcccgactgctggtgcggggtcttggtgagcatgagatggaggaggatgaagaggattatgagtcatcagcaaagctgctgggcatgtccttcatgaatagaagctcaggccttcggaacagtgcaactggttacaggcagagcccagatggggcttgttcagtaccctctgcaaggaccatggtggtctgtgcttttgtcatcgtggttgctgtttctgtaatcatggtgatttacttactgcccagatgtacctttaccaaagaaggctgccataaaaaaaaccagtcaattggactaattcagccatttgcaacaaatgggaaattgtttccatgggcacagatcaggcttcccactgccgttgtgccactacgctatgaactcagcctacacccgaacctaacctcgatgacattcaggggttctgtgacaatttcagttcaggctcttcaggtcacatggaatatcattcttcatagcacaggtcataatatttcaagagtgacctttatgtcagcagtttcaagccaagaaaaacaagctgagatcctggaatatgcatatcatggacagatcgccattgttgcccccgaagcccttctagcagggcacaattatacgttgaagatagagtactcggcaaatatatctagttcttattatgggttttatggcttctcctacacagatgaaagtaatgagaaaaagtaggtagccctcttaaatgattctggttttacgctctgataacttctgcaatatagatccctttgtccacaccagagacacgaattgtgatttttttttttaatttaggaagttatatacaaaatagtagaatggtgatttagaacaatatattatctctcttagtcaacgccttgagcatatatcatggtggggtggagataggggtgtgctggtggaaaaggatggataaagattatatccaaaacttgttatcttgagtttttcacatttttaaggtgaatctagttttctgtcacctcatgaagtctgttgggaagcagagtaaagaggagttattctttaagacctattttcctaatgtgcagaacttttaggaggtacttagtgaaatacagaaagagggcatgaagaagtgtgaagtgtggtgtgcttacatatatcatttttaatatccttaatctttactggtttattattttttaaaatgccagtctattttggatttctggtgtaaattttttttaaggtctaggagagacttaatttggttcagaaaaaaaggtgagacaaaatataaaattattcagctccctatttggactatatatttagtactttaatcttagcattcatagcatgtagtttgaaattctgggaagatggagttcacacagtatggaggttattcttaagtagcagtgatatcagttgtcttgtgcacaaaatcctcacgacatctgctttatgcaattggaacattctctcatattactctgtaaaacaatatgtgaattactgatgctgaccatttggctaatgtatgttgacatattaagagaaatagttagaaatgagtattctacatctaaaggaaactttttgatccttcttaaatggagaaagagaccaagcaagatccataattctattcagataaataatttttattttattttccctctatgtaatacttttaaaataaatggcatactggccctgcatttcaattcttgcgtgagatctgggattgaacacaaatgtataattgcaatgggaacttgaaagttcttgcctttagttctccttctataatgcctattatccccaggaaatgtaagctatgtgtaaaaacaagaaatacatcccttaattactttatctaccagtataaatatgtattctaatcatacctcagagaagaaaaatttataaaagcttctctaatagaactaagcaaaattaaaagagagaaagacaaaaaaatggctttgaattatagttttcagacatcttgaaaggtataaataatctaaacatttacctggaatcaagatatactatcacttgggggattcattttactgatacttttattttgttttgaatagcagagtttcacgtactaatttattttaataggttgtaaaatactgttttataatactctatttcttaatcttaaagaaacatatttcatttttctgacattttccacaactcaatccagcccatggcaagagtcaacaagtggccgtaccaaaaatcaccttactctgctgtatttattcctcccattaaatagttaacgagtacaaggattccagggtcaatattctgatgggaagagatggctagggcacatgtcctaaaagtctgtttgcatactaagaacatatttcttgttgattggaaaaccattgtatgtaaacgtcagacaccttgcgtagacactgcttgttgtaagggaacttacctttacccatgtgatctaagagacagagacagtcagtaaccttggagttaaatctcaaagttgtttatgataggcttaaagtcctagataacaaactgatactaagaactagtaaacaaattcaggatagggatgtgtttcagcagttcctcgtttctaacagaatttaattcaagaccgtttttgatctacccttgttttttctttctcatagttctcacctgccatggtgaactttctgatgataataatagccagtattcacctggaactgaagggctggaaactgttccaagcctcttacgtgtttagtcttttattctgtcaaactcactaagagatagatgttaacattatattcattttacagctaagggagcagaggcacataaagtaacttatccagcatctcatggcaagcagatagcagagggagaactcaaactcaaggtcattttaactgcagaagccacattcttcaccaccatggtgcactgcctctctagttcatacttgctttcctttgtacattgttatctccagtgtttgaaattctcttatccccagttaatttgtaattgtcttgaacactacttgataaagtgttcaactttagtatttcagaaaggaaatatactctccagtgaaagaataagcttcaagttattcagcatagatagaacaggttataagtattatcaagcagcagccttctcaaagggatttttatgtgagatagttatgattggatctcttaacaacagtttaaggctttttcgccttagtgtgttatgatctaatttttatccaaaagtggtgggtctctcttgtatgaatagtagggataacatcaaactttattccctggtcccttatgcttctcttccaaaatcttctgttaactacataagaatgttgggggtgggttgaagaaatgaaatgttagaaacataatatgtgtaaattgtttcatgtatgttgattgctacctttcttgcagtttacccaattcgatagcaacagttatttgggcacacatccttaacagaaaaaaagcaaaaacaaaagaatacaaaacaaaaaaagtacacaaattttaagtgtggaagaagttaggactatcttgcatttgtaataaatatctatttaggaccatatgatatacaagtagtttttattataaatagttttatttgattctaacaaaaatcctaatctttaggaccatatggtatacaagtcgtttttattataaatatttttatttgattctaacaaaaaccctggtgtttggcagtggattctatctcagtcctaatttaactattaaggacgttgggatgtatgagatgtaaggacattgagatgtatgagatgtaggttactgatttgcccaaagtcatgtggttagtaaattatagagtctgggtcttctgactccaaatctcatactctttcttttctccttatcttctagtagtggaaactaagcccaaaatgagagaggctaccacctccaagtggtggttgtatatgtgctatattgattggtacctgaaatatgcacaccagggccatatatttgccgtgattatagccacgctgggatgatctcccaagttcagatctagttattcttttacttaactgaaaatctgcatttctccttgtttctttttatgcttttccaccaacctgtaatcgaggacttttctttttttttcccttgagacagcatcttgctctgtcgcccaggttggagtgcagtggtgcaatcttggctgactgcagcctctgcctcccaggtgcaagcgattctcctgcctctgtctcctgagtagctgggattacaggcatgtgctaccatgcctggctaatttttatatttttaagtagagatgaggtttcaccatgttggccaggctggtctcaaactcctgatctcaagtgatccgcccaccttggcctcccaaagtgctgggatttcaggcgtgagccacctggcctggactgtaattgaggatttttctgtgtcatattctcaactgttgttggtgtgctacagaaagaggaggaaattttttttaatctctgaggcgagtaaaggaaaccagaatactacaggacacctaattttttcaatcttcatgaaaatgcaagctgtgaatttgaggtttggtatcgtgaagccagagtctgtacagataattcgcagcaattaatgaccacccttcttaataatcttccatcagaaacctttttaagacctcagtggccagttgcagcctacctttgtggcttcatctccagccacactggacagccacccccagtttctgcacatgcactgctctcttgtgttcccggaccaaactgagggtcaggctgctattttttgctgccccaaaacgagatgcagatgaactgggaagagactttttatttctataaccagttatatagggagaaggcctggaaattattgccagaacaactcaaaattacaaagttttccagagcttatataccttctaaactatatgtttacgtgtaagtgtgcatttctctaaagacataagtgattaacttcttttaatccataactaaggtccgagtcttgaagaccttcctcttgagcctcagtaaatttacttaatctaaatgggtccaggtgctggggtgattacccttatgttgtctcctgctaaatcacggaggtttggggagttccttcagacctccagtaattgtttgtggaggcctggggagtttcttcagaccctccaataaaacttatttaatcctaaatgggtcctgttaaaaattccttcattattttgtcatgctttaagacccaggcaaaactcttggtgggcttttgttaaattccagcctttgtataagggcactggcttttaatatttaacttaaccactcagccagtactgaaacagttgttatggaggcctgcattagtgagatctggcttgccacacttgtgttacccactctttccagagtatactttcttcccttcttcaccttttcaaatactcatctttttaggccctcttcaggttttctgcatgtttccttataatatcttcaacctctagtcagaatttgtttccttccctttgttcccattgctttattttcattgttaggacatgacttacagcctgatgtaagtttctgttcattgtataaacctctgcctttcccagtttattgcagatcctttagtaactaggattgtaacatatttatcttagtatacttggcagggtgccttgtacagtaggtgctcagtaactactggattgaatttgtgtttgttttaggtactttgcagcaactcagtttgaacccctggcagcaagatctgcttttccttgttttgatgaaccagcatttaaagccacttttatcatcaagatcataagggatgagcaatacaccgctttatcaaatatgcctaaggtactgttctgttccttgaatgtaaaaatctttgaatgggtctctttctttaagaacacttaaattcctctttgccagactacagttgagaatgattaaaatcatatacattaatattcttccttaaaatacttaaataaaaattaaaatatattggcatcagttgggaagtcaccttgaggaggacttgaggaaagagaaagacctgctggacttggaatgtgtggataggaaatgtgagtgtgcattgtatattaagttgtgcaaatattaatacaatgaactagcaaaagattagagtaatattttctgagacaggatgaatttgctattctaaactgttatttgagagtgttgaataataactctttttggtgttttattggtaaatgaaaaaccaatattgttataatatggagattgacaactagaacaggagcctctttcttagatgttagctctgtgtgggatgcagtgagggtgaaaccaataattgtttttatgccaaacaaaacctggagcctagggggtctttttttgtttttttttttttggtcttagacacctgagggactgtgcagcttgataggagcctcctggacccatgtggctaagggagaggagcagcagccatacccagcaggctatggagccaatcctgtaggcagcagagagcataatctgtaacaagacagcactgtaccagcttactctgcacactcagccatactcttcaccttcatctttctctaaagaggcagatgcctactttaatttgtggttggaaaattctataaggttgcctacattccctcattttgtgtctgctgcagacttctctaatgacttactactgactttgttcccactaagctttcttgggggtcctcaacatggcaccccatgaagccatttcagatcatttgaagggatgtcgcagctagagctccttctgtggatgtatttgtagcagtagagtggagcaatcccaggtcataaggaaggattttggttttggaggtgttctaatgggagaagcagaaccaatgtgactatctttaacttaacatttatttggtcatctttgggactaaaaactccttgaggagtttcactgtgctccatatgtcctcaggatgaaggatggtacaacagactgagactaggagccatgctctttgcagaaattcatactgagaggttataatatgctagcatctttaccatttatttcctatttgaattttcagtttctcagtttgtttgttattgccatttattcctatagttacagaactgtcttttcccctttgcttgtagaagtcatcagtcgttctagatgatggacttgttcaggatgagttttctgagagtgtgaagatgagcacttacttggttgctttcattgtgggagagatgaagaacctgagtcaggacgtaaatggaaccctggtatgttgatgtggtaattgtctgaaagcctgtgtcacaagaggctcagaggacctcttgctttaacgattcctggtatttgctgtgtgaaataaataagcttttagatcacactctgacattttataccagaaatgctacttttttgcttagctgttatttactgttactagtttaatagctgaaagtcaataattttcaagttttaaaaaattttacttttaaagagaattttagtaagacactatatgtatactaaagcttttagaactgagtggtagccactagccttagggggaatatttagatttaaataaataaaaattaaatacaatttaaaattcacttcctcagtctcactaaccatatttcaagtgttcagcagtgttcatgtgactagtggctacatattcgatagctctaggttgtaaaaattagatgagtcctcccttttttcaaagcaaatcctgatgagattcctcttcctaatgaataagattgtctatttagttaagggtctggtttatctgtattttgccaaaattagactcttctgtttttctttatcatttgtacctgtttgtaaatgattatttgattggactttatactttgatttcatagtagaaacctaataaagttaattttttcaaatactgacaacatagaaggagaaaaggcattctatcatatttattaaactaaaaacaattattcttgatgatagaaatatgatagaatgtcttagtttctgttttcgtatttttgagctctaccagggaatatactgctagttttgggtttcctttctagactaaagagctttatattaatcacaggatacttggatcttatcattttgctacttcaaaagggtatatgtttcctattagaaaagactatcacgtctatcccatacctttcagagataaggacagagataaggattctctggtgatttatcagtaataatactgtatgcctttaatgatgctactcaaaaagtaaactaagtttttaatggtaagtgtagactgtaatattaagcgctaaataatggttcactcacctttggattgaaagactttatgtcaaggatttttcagaatcctttcaaaaggatattataactggcttaaatctgaaataattcaattaattccacttcaggtgttgcactacatatttagcctttgatttagagtttgcagccttgataaagcctaagaagcccaatctaaaagagtcaggtttgctgctgcttcaagactcagctgaatactacgttctccatgaagcatttctttctttccccagctggaattaatcattccctctctgatctttcatagcactttaattatctcttttttgtagttcttaatactcattggtataaaacccccagcactttttatgtatcccaaaatgtatgcagtcttggcattttccccccttcttttcttccttcctcttcactctctctcttcctttttccccctttctctcatctgctgtgtttgcttcacactacctgtaggattacattcagattcatcatttgataatcaaggccttccttataaattcagcaatatttcttttcttgtttaaaatttattttttccacccatctgcacactgatctttcttttttctttttcttttcttttttttttttttttgagacagagtctcgcactgtcgcctggggtggagtacaagtggcacaatttcggttcaccacaacctctgcctcccgggttcaagcaattctcctgcctcagcctcctgagcagctgggattacaggtgccctccaccatgcccggctaattttttgtatttttggtagagatgaggtttcattatttggcctgctggtctctaactcctgaccttgtgatccgcccgcctcagcctcccaaagtgctgggatcttttttaaaaatttttttagtgacagggtctcactctgccacccaggctggagtacatggtgcaatcatagctcaccgtaacattaaagttctgggctcaagtgattctctcccaagtcattgggactacagacaggcacctgccaccatacttggctaggtgttttgttttgtttttttaattttttgtagaggcatcttgctatgttgctcaggccagcttaaactcctgggctcaagcaatcctcctgcctcaacctcccaaagtgctgagattacaggtttaaaccatacttctggcaaattcagctatatttctaattgcctcattatgaattctttcatctaggcaagctgaattattcattgcccacatacacactgcattctcatatatgtgtgtgcatgtgcatgcttgtgtgtatgtgtgtggaaagaggaagagatagagaagttttagatgactatgttttcttttttgctttttattcctgtattaggaaacaacatggttaaacatagactctggagtctaattgggttgaaatccctcctagacagcttactagctatgggcccttaagtagactgctctcatcctttctcagtatatatatatatgtgtgtgtgtaagtgtataatatttgtgtatatatgatatatatattatataatatataatttatatataatatattgtatataatataattatatattatatatttatatatattattatatattaagtaagaaatagagcaaatcttaaatctgttattgctcagtgttaaccttctttgagagctgatcagggatctttctagttgtgtttttagaaatctcctataagatctttgaaagagatctgtcaagaaaagtttcaggttgtaagttttaaggcctgagtgccgattgacttttatttaacaatgtttagagtactcttaccaagtccagaatgctgttcaagactttctttgctgagctatgttgctctctctatttcttactgcatctgttgctcttagaaaagctttataataattgtaatgaccagattatttatctctcgtaagaactcattacagatgttcttttaaggaaaagaaaaagaagtagaaaggaagagaaagtattaaactacattttttcctaatcattgtattccagagatgggaataagtggaccctttggtcaaagttcagtttcatgtgaactttttctcctggcttgtcctctaaggaaaggtgctcagtgatgggagttgccaaatggtgtgtgtggcagaagaatgttttaggagtaatctggaggtatgagtgatgtttctattggggtaccatcttctagattattgaggcaactgtaacacaagatatgtttgtctggaaagaataggtacagctaataaagacttgtcttaaattctattgatcttgttacagttatttataatgatagctgaagatttaaaaattgtatgtcaggtgcacgtgcgtgtgtgtgtgtatattaaaactgacttctgtaggggaaagatgcaggaaatgcagtaagtaggatcagcttgtaggcggtgactgaattcagtaagctgtggtcacagtcctgtatcaagggcttcaggtgttagaaggctgggctaatgaagtacggttggctacataatatgggagaataaatttcttcccttgttactttagaaagctacatatttttaattggttaactccagttctatacatataattcttccagtagtaaccacaaatattctgttcacacatattttgcctcaattccgatgggagtctatttgtaataacaataactaccatttattgaacacttagacattgtgtcacgcactaatctaagttctatacatgtattagcttaatcctcacagcaactctgtgagggtaggagccacttttatccccattttatggataaggaaagtaaggttaactagcctgcttaaggtcatacagatagcagagatttgaaccccagcactgtaaatacagagcctatatatttcattttttgttcatttacttaaacattctatattgtttaatttttatgccacctccatatttctatgattaatgcatatgttctatagactgaagcctcacataaagacaatatggttgaaacctatttgacctcttagaaattgttgacagttttttgctttattttaagaggtttttggggaacaggtggtgttcggttatatggataagttctttagtggtgatttctgagattttggtgcacccatcacccaagcagtgtagactgcacccaatgtgtaatcttttatccctcactcccctcccaccctttcctccatgttcccaaagtccattgtatcattcttatgcctttgcatcctcatagcttagctcccacttatgagtgagaacatacatacgatgtctggttttccattcctgagttactttacttagaataatcgtccccaattccatccaggttgctgcgattgccattatttcattcctttctatggctgagtagtattccatggtatgtatatatatcacaatttatttatccactcattgatcaatcccagtagtgggactgacaaatcaaatgattcctctacttttagttcttgaaggaatctccacactgttttctatagtggttgtactagtttacattcccaccagcagtgtaaagatgttcctttttcaccacatctacgctaacatctattattttctgattttttttggttatggccatttttaccaggagtaaggtggtatcgctttgtggttttgatttgcattttgctgatcattagtgatgttgagcatttttccaaatgtttgttgtctatttatatatcttctttggagaattgtcttttcatgtccttagcctattttttgatgggattgttttattttcttgctgatttgtttgagttccttttagattctagatattagcctttgtcagatgtatagattatgaagattttctcccactttgtgggttgtctgttcactctgctgattgttgaataagatgtcctttccccactttatgtttttgctttgagaaattgttgacagttttaaaatcatttaatgagaaactaaaattggagttaagagttcaccaatgtgctttttccaaattatgaattgttcaaaaagtttccattttccacctgttgagatcttcattttgaggtttttgttttctactgtgtctaatctacatcccacttttccaggtgagtatagagggctttttaaaatcaattagaaaaaaataaatactgttttgtaaaacccattgctttgaacatggctgtttaacacttgccttttgatacttcctgaataaaatgtttatagtttgtcgcatcatatatgtttaatttattcatttagccaaaaaaagagagagtgagcaagaattgcaatttaataataaggatgattccatctgccttgtctcttagtatgtacccgggagtgaatgggcagtgggagacatgaacctgttgttcccttggttggttttagttctgtgtacaactcataaaacaagtgtttctctgtataatatatttatttttacaacatgacccttaaaaacaagccaacaactgaaaaaaaagttagctgtccgcagcattggaagaaaaactggctgtgccatacttactggaagagaatatgttggtctataattggtttttctaggataatttcaacaaatatgcaatttatgccttatatgttaactttagaactaactccatcataagatgtgactcctcagtgttgagtgcctgctagatgccaggcacggtgaggtcctgaaaggatgaaaatttagttttgtctttcaaataactctcaatctttttacctcataagtaaggaagggcagctacaggtaatgggagagaaagagaagagtatcataaaattaaataggcaaatacttataagttgctataagatgacctaaagtagttattttggatgttgctagcttaaaaaaaagcggggcgggggtggggcggggttggaatcagtaagtctttcaacaatgttgtatgtgtggaagggacttggtaaactctgttgggactaaagtaaccataagcaagtgtttctatccagaaggatctcatacaattctatagaattttcagatatgctagtcttgacagtgctacttgagtatcatgccattttaattgtacctgtccttgcatcatacataatgttttcctttaggtttctatatatgctgtaccagaaaagattggtcaagttcattatgccttggaaacaactgtgaagcttcttgagttttttcaaaactactttgaaattcagtacccacttaagaaattgggtaagaatcaaatagtgtgtctgatttttgttataattagaacctagatttattttgtgaatttttttagaaagaggttctgcccaagttgtttgcagagaaaaccaaaaaccattattaatgctttaaaaattgtttgtatttgttaagattatttagatttcatgaaatctgaagttggagcttaaaacacttaagtttatagggctgctaaaaaggtgctgtataagtgggaatttgcttatggcttagtctgcaatttgactaattctaacttccaagaaataccctatttaaataataaaaactgagtaacgggagctcaggaaagcaagaacatttcagtgctgttcaacatggagctagtcctagagagtagagtattggccgtgaactttgtccttcttgctctgggaagctgattgattgtaaaggaattaggcatctctttcttcactaagggacagtggaacagtgactctaaaagggtttgaacaggtcttcctcagctgacatgtgggtagagagcatacagagctagaataaggaagattccatttattgtgagtataaaaagaattcattgctttcacagtgataaaccattgaataaaatactttgagtagaaaatgcctaagatgagggaaagttgatcacttatttcctgttatgtccagatttggtggctattcctgactttgaagcaggagcaatggaaaattggggtttgctcaccttccgagaggagacacttctgtatgacagtaacacttcttcaatggcggatagaaagctggtgactaaaatcattgctcatgagctggcccaccaggtattagcaaccaaggctgttctgtgtcacacctgtggtctacttcatgtcctggagttattgttagcatttagatgctaataattctttttttttttaagcattgccttcttttataatagaaagatgctttttaaacacaaacttcattttcaaatgaaaatgctatcagatgtttgactttacaggttaaagcattttcacatctgtcttacttcgcaacttctctaaggtgggtattaatcacattttacatatgtgaaaactgagactcagtttaaataaatggcttgccataagtcatacagctaataagtggcagcactgggccatgaagagccactatctcttcaagatctctttttccccctcagtaatacacagctgcatcacctatgacaaatgcccattgcccagtataactttgtggggaagaatctctttccctaagttgcacccttctgacaactcaaactgtagctgtcagggctggatttttttttttttttcatctcctgccggaatggggttctctgttaattttggagagggggtttctgagaaaatggcaaagggtactgtttgtatgacatggagagaaagaaagaaaattatatgggtacatagcacccccattcttccctaacaccttgtctctattttgccctagatgaggtgcttaactagcattgggtatggtttgggtgatgtcatgacagtggcaggatatgaataggatgtattctggtcagcttattttctacatcaaacaccttatatgaatctagcctttgtgaagacttcatgacaagctggcatatgagcacattctcatttgctttaaaaatagggcatgggccagatgcagtggctcacgcctgtaatctcagcactttgagaggcggaggcaggcgtatcacaaggtcaggagatcaagaccatcctggccaacatggtgaaaccccgtctctactaaaaatacaaaaattagctgggcgtggtggtgcatgcctgtaatcctagttacttgggaggccgaggcaaaagaatcacttgaacccaggaggcagatgttgcagtgagccgagtttgcaccagtgcactcccgcctgacaacagagtgaaactccatctcaaaaaaaaataggtcatatagataagatgtcttttgggggatctcctctaggtctgttatttctgaagccacccatcaccatttgggagtatttctctgttatttcctctttaggacttagaaatcatcttcctctgaaacaggttttaaaataacatcttagaaaaatgttattgtaattctcaaaggtgttttgttttatgcagtaacctcgtcctttcgctgctgatttgagataagcccaagaccacactgaccaaattacatattttacaactacttttcatttcaaggatttttttagatacattttttaaggagaatctcctattatttttttcctttttcttttctttttactacctcatagaagaaaatatttaaagctctttctgacttcatttgtttatatatgccatctttttttttttgtttttaaagaaacaagatctcactctgtcacccaggctggaatgcagtggcatgatcatagctcactgcaattttgaactcttaggctcaactgatcctcccgcctcatcctcccgagtagctaggccaacaggcatacatcaccatgcctggcttaatttttttgtagagacagagtctctctatgttgcccatgctggcttgaactcctggccttaagcaatcctcctgccttgccctcctaaagcactgggattacaggtgtaagccacgatgcccagcctgtatatgtcaacttagtcttaaggaatgttgtttgaattctgttttgaatcatgcatatactgtcttcaatttgggcaactgaggagaaacaaagtataggctttctgattacaggaaaatctctcacatagagactttttagttgtcatgggtggttgtagatacaatggaaaataatcttactaacttgatattagaaggtagaaaaatgtcattatcttggaaatctcactttatgaggtggccgaaaaaagtttttatttccctatattcatgctatattgcatgtttgttacattgataaatatgctaataacctttcttgcttgtttcccattcagttaaggtaaaagattaaaaattatattttatttttaaagtaaatttatacaacttttgtaagttctaaattaatttgaatatagtttgttttaactatagtatcagtatatctttaagatattgtaatcaggttatagataattaatatgacacttcagccaattatttaaaaaattcctgaggctgtaaatatcctgtgggttaattgttttctctcccccagtggtttggcaatctggtaacaatgaagtggtggaatgacctatggctaaatgaaggttttgccactttcatggagtatttctctttggaaaaaatattcaaagagctttctagtgtaagtacagggtttctttggcctactatgaatgctaggaggaaaaatagtcaaatcacattttcatgtattttctgtgcatctggagtaatgaaaatgtttctaggaaggtatgccaaacttgactttggttattgatatctataccttttgagatttgacaatgaaagggatgctattatttactgatgtgtttcattcaaaactgaaattatataagattattttatatttttgtcattaagatgaacattttaaattgttttgcaacattttcttttaaacagctatagttcttctgcttgcaggaatttaaagttgcaaagtctaattaaaatttttttatcctgtgtaaaatttaaacttttttatcctgtgtaaaaattagataaaaaattaaaacattttatagcaatactgtttctctattatcactgtgtacattcttgtgatagtgatatatagcttggtacaaataaataatttgccctttttaaggtacaaaccacattttatgcctttttccaaagacaaggaataccgtttcagtacagagaagtataatagtggtgtcactatggtattagactcttgggaaatatttccagtacttagggatattcaaacacactaggccatgatatgacagatattgtcaagataattcaaacaataggtgggaaagtgtaaagataccttccaacccccaaattttttgactttctattaaacttcctgatgttataatccaagatggcttttaaaacagaagtactcttaagagcttttgatttgaaattttagatagggcttgttgaaaaatttcaagtggtaggggaaattaattgatgttaattaatatcaagtggtagctagaatactaagaaagatattctaaatccatgtatactacttaattaagtaatgagatacacagtttgaccacttggtggtgcccagaatgtgtaaaaaggtctaatacatgttctaggggagctcatctgctgagctcttaaagaattatttctgtttaagagttacattttatttaaaaccgacctcaggtaagggaaatgtatattttcttagtagaaattctagactatatataagaaatcagcgtaagaaccagtttttgttctttctctttttaaatttcaagtttcatttaaaaaaatatatgctaacctttttagaatattcatcttggatactcagagttggcatttgtttactttggtaatagattcttaattttcccatatgctgttgtttaggaaatgctaattttaatgtggccaggttataattgtatctttaaatttaaggaatattcatgaagtttacaatcttcctacatttttgaaagcttatatcctgaagtttagtgacactggtcattttttcctaatgatatttcacactaattagtctaattcacataaataatttactatacttttgcatttgatactacttgtgatattctaatcttttcattttttgacagtatgaagatttcttagatgctcgatttaaaaccatgaagaaagattccttaaattcatctcatccaatatcatcatctgttcagtcttcagaacaaattgaagaaatgtttgattctctttcctattttaaggtattgctgtgaacaaaaaggtagctggagtgggtttaaaatttcgtataatttcgtatgtgagcaagctgtgtgatttagattattttaaagattaaatgtttttcaggtattaatggtaaactataaaatgtttgcttctgtataaatcttggtcataacttttttgtgggtttttttctttctctgactctaacttaagttgtatgactagtattccagacaattaaccagatcttatagcgatgcatcttttaaagtcagtttactctccagatctacaggtagaatatgttcagagaaggtcctaagtaagctcttggctgtgttactcagaattgaggtatgctgtcaggtcaggactgccaaaacaagtaagcaaaaagagattttaagaattgaagattcgattttagaatctgaaacacacgccctgggtttcaaggtaaagaaaaagcagaatgttaaaccccattcggatcaccataggtcggagaatagaagaatagtgataacggtgtcattcacatttatgttgtggggagggatgaatgttatggctgtcagacaagatagagaagaaaatacacaaaatgtgtgagatacagtctatgtcatcaagtagctgaaagttcagatggttggtacttgtggagcaataagagaggtaatatgtgctgagtgggacagaatttttgcctaggataatgaagagaaacttttgggaggtaaatgggaattgagttggcttaaataattaaaatataggtaaagaggaatgtgaagtatagggtagggcaggaatggaacaatgaggtctgcaaagaaaatgaagtactaatgggcaagtgatgttttttcagagagtcagtgtttgaccacagtggaagccacacgtgaagagggaaaagaagagaaagttgagtggggcccagttgtagaaggctctggataccataaggaattatttttttcctatgcaacaggaagcttgaaaagacttttgaacagaggaatgacttgattaaagttactatttaggaaaagtattttggtttcagtttataaagtagatttaagtggggagaaacgtaaagtcaggaaattgctgctaaagtccaggcatgaaatggtaaaagtttgaaatgaggagtgctagtaagggtggaaagaaaacaatgggtataaaaaatactgggcagggaaagtacttaaagtattagtgacagggtaaggccagtaaagaaagaggcagaaatgtttttcaggttcaaacctgactgacaagaagaattattgtacaggtactattaacaaacaagaaaatcaggagttcagttagctatattaaatctattccaattagagctactggtgtgatttttgaagaccatagtggacctgtcaataaagaaaatttaaaacttgaggttctgttattataccaaacttagagcagttatttcaggatttgaaaacctgcttaaaatgctctaagtttattatataataacagaacagagtcataacagagttctgtctgccactgacccaaaccctctaaacccagaattcagtgtcttctgaatatgtagtttccatatcattgtcaacccctgtcaacatggtaactacttgtttcagaattgggaatttggcaaaaatattctgtgtaattaagagaagtgggatactagataacttatcagtattgtgtgcaagaaggtaagcaccagcagggaaatacgtttagcagacatattctgtttggtctttataatcatcaagcctaattctgatgcaggttgccttgcaagaattcattcatttagcaaatcttacaaatactaaccatataccagccattgttctaggtgctggggttatatcaggggacaaggtggactttgtctcttttgtgaagtttccatttcaggggtcaaaggtagagactgactgtatacaaatgaatgaataagtaggtattgtgttaagtaataagtgctaatatgaaaataaagcatgataagggaaatgagaatgacaaaggaaatggtgtttataatataatgtggttgagaagccctcctgtatggtgacatttgaacaccatctaaggcatgaggaatgtggttttcttggggaagaatattccaggtagaagaaataaccaatgtatagtgcttgtgtgcagaaaagaattaatataggaggcctgagactgctattctttgaaagacctgcttgcaaggttggcccttgggtggcatgtgggaacttgggttttgggaaatttcccactattgcatgataagagtggctcactgtgcctaaacaatgtagtttatgctgaaaatgtgatttccttctgggtgtctggagttttggtatgtgctaggcagaaggtaccttcgtgactagcccacagtaaacagcctgggtgctgaatctctgatgatcatccgtggtagatggcatttcacacatgctgtcacaactttctggaggaattaagtgcatcctgcatgattcactgggagaggacttggaagtttgtgcctggtttcctctggactttgtcccatgcatcttttttcttagctgattttacttcatatcttttcaccgtaataaatcatagcagtgagtatgactatatgctgagttctgtgaatccttctagtgcatcatcaaacctggaactggtcttggggacccccacatgagatatgagattgagagagatacgagattgagataaaaggttgctttgcatgttcaagcaccagcaaggatccagtgttatctgaagtagagtaagcagaggagaaagtagtagatgaagttagagggactgtaagaggccagattattatagggtctgctaagccatagtaaggaccttgattttattctaagtgaaacgaaaagcaatttgatcagggaagtaccgtgatatggcttattttgtaaaagatcactctagtcttcaacagtacatggagtaaagaggactagttaggaagttattgtaatagatgggtggcgagataatggtagcctggacaagggtggaagttgtgaaggtgatggaggtacaactggacttggagtgtgttttaaagattgatccagtagaatttgttcatggattagatatgaaatacgagagaggggtcagggtaactttaagatttttacctgaacaactggaaaaatggagttgccatttgctgaaatggagaagactgctttagaagtaggtttagggaaagaagggggaagaaacttccatttctaagtgactatgagatatggattagatatccaaatggagataccacacaggcagttggatatgggtctgaaattcaagggggaagaagtctgattagatatataaatcaggggatcatttggaaaccttggagttgggagatcaactaggaaggaaatttagatagagaaaaggggtccaaagatcagatgcaaggacacactttcttcattggaagatgaggaggattcagtagacgagaccgagaaggatggccagtgaatagggagagaatcaagagtagtgtcttgcagctctcaaggaggagcaggtgatcagttatatcaaatgctatcaataggttgataagatgagcctgagaattcacatttgtatggcaccaggaagtttaccagtgaccttgataaaaatacttccggccgggcatggtagctcacgcctgtaatcccagcactttgggaggccaaggtgggtggatcacctgaggtcagcagttcaagaacactctgtccaacatggtgaaaccccgtctctactaaaaatacaaaaattagctgggcgtggtggtggtgcctgtaatcccagctactcaggaggctgaagcaggagaatcgcttgaacccaggaggcggaggttgtagtgagcggaggtcgcaccactgcactccagcctgggtgacaagagtgagacttcatctcaaaataaataaataaataaataaatacttacagtagagtgatgattagaagatggctcaagagaaaatggaaagagagcaaatggagatggcaaattgaggacaactcttttgaggagttttactacaatgggggaacaaaaaaacagcacggtaacgagttggtaacgaggagggtgaagttagggaaaggtagagagtcttttatttgtttaaaattaggaatgttacatcgtttttgttttgttaatgggcatgttacagtatgaagggaaaagttggtgatgcagaagagaaaggactgttggggacaacagtgagtacttaaatttatagaacaagtaatagctatgaagtgtgatacagaaatgagagtaataggtaataatttagttatgtgtacaataatcttgacattactacatttttatcaaaagtgaaattcattcaaaaactactagagtgcctactatgtagtgggcattgtttttgtcattggagttgagttttcactttttcctctcagcttactgcatagatgaggaaataaatgtgtaacagatacaggatgccatataaattgtattgaagatggagaaatgtgatttctatttcaaaccgggaaggtcttcacagaggaggtggtgcttatttcaggattgggaatgatgacaagcacatcaatggatatagtgtggccttaatattatgctccctgccctatacatttgttagttccaagcatttgaagtgactctgcaggaagaagagagattctggttacttcacaacacaatatactaaaataagaaattaatgacctacctagcagggagacttttgagagccttgtcaatttattgtgtctccagcacacaataaattcaatgggtgatttaagcactggggatggaggtgtaggtgccacagaaaatttggcatgtttttctattaaaatgtttttataaatacttagcttttcaacactaacattgaaacagtgagtataccaatagaccacacagaatgactcatggttagaatagtgcacatgggaatctactcattaattctttttcaaatcctttaaaataattttaagacagttgaacacagtccacatctatatgagactaagtagcagtatattataactaagttctacatatgaaagtaaatttttagaatgactgtagtttgaattttagattcccaattcgataatctatagtattctattattttctttctttttcctcacttttttttttaatagggatcttctctcttgttgatgttgaaaacttaccttagtgaagatgtgtttcaacatgctgttgtcctttacctgcataatcacagctatgcatctattcaaagtgatgatctgtgggatagttttaatgaggtaagtgacctgggtaatttatttagctcttactgtaaaaagagaggagttcgtctatttatactttttagcatgtgtgtaagttaatctgtggtacaaagcatagttatttaagaaagggggggatggagcttgctatataaatatttatgaatggagcactaaattttatgtcaagaaatgggagtgctgttcttagttgttggaaaagacgtgtgtgggcttgggtagccagttttttttttttttcctgtaccttaacttctattcctattttgtaggaaagttgtcttctccgtattaatgaatattactatattttcattatttgactttttttccagaaatctcttttcctatccttacccttttagtttttctgcctcttttgaatgattctgtactctgctctatgaatctcttgcctttgtgactgttcctccagagtagatgatacatcacaagctgactgcatattatccttggatgattttgctgttggaattttgtcattcctggaaatattctagcaagcagtgtaattatgtagaagttacacttcaaagcagcacatgaacccgggctgcttcatgcatgtatactgactgcaaaacccttataagcatttgtgtttgttaccctgatttagattgatgggtcataatactttgaaagatcacagatttgactgagcgtggtggctcacgcctgtaatcccagcactttgggaggccaaggcaggcagatcatgagatcaggagttcgagaccagcctggccaatatggtgaaaccccgtctccactaaaaatacaaaaattagccaacgtggtggcacatgcctgtagtctcagctacttgggagactgaggcaggagaatcatttgaatctggtaagcagaggttgcagtgagccgagactgtaccactgcactccagcctgggtgacagagccagactctgtctcaaaaaaaaaaaaaaagaaagaaagatcacagacttatttggaaatttgatgaaagttctggccatattactcagaaaaaccacatatgtgcagaacatcacacacagtttcaaagttttattgactctaggttaggaacccctgctctggatctttctcatacactctttactgcttctttgcctcatctgaatcctgatactttctagctgttagtcttttgcccagaagatataccttccctactctctgaattctctttgagaacttattacctaacagttgttcccaaatcattgtttttttcctctgatcatatagtagtatttcaattgaaagccacattgtttactttatacttactgtcttaatctgttggcatttagaacatatttctgccgttctcattgactgcaacttttgcatcatggtgtttttccatcccaaactagttcctaacattatcctcaggtttttcagcacccacatcaaattatgcattggcctcttcacttcaatactgcttcgacacccaaaagcaccttggttttaggcaagcttattttcttctaatcctctggttcagaaataaataggtcagagccatgataaatacaagtttaattaaaatgggaagatttgctccatccttttgtgctttaaataaatgggcatatggtgattgaggtgaggcctgccatagtagagtgattttatcaatttaggtacatcatgactttgttgcttacaattcaaattcatatataatctagaaaaataatttgaatcctgagtttaacccacctgctttaaagagactgttgttcaaaaattgcttcttagttattgatactagatgtcttaggggctttgggccttagagggtctgcaaagctctgacactaggttctagattttatagataacttcatatattttctgggaaagaagggctgtgaccactaaagtagtttaccactgttttctagaaagacttaaggcaactgacctgttcatatgtcactcttctgctgccgctgctccctggcactcccacagtattaggtcctaagagactatcattgtggaggtggagggtaggagcataaagagaaacccagactcaggtgcttcacaggattgagtagcagtgtttctgattctagactgtatatcattattcatatcttgtagatgttagtattgtgatttgaaagaatacttataccttcttagggattttaacttgatgaatttagggattttaatgaattcttagttggttgatatatgtgccacttctcaacctagtgcctccctcactcccttagctatcacttagctctgttccaggttacattccttttagcagttgctcatttacctagattagaagtgtaaactcaacattcatgtttcttttttatattaacattaaatgtagtctttatagatggtaggaaaagagggaagggtacagataaattaaaatgtaaaattttttaaaccaatttttatttttaaggaaaaagttttatatatatatatatatatattttgtaggtcacaaaccaaacactagatgtaaagagaatgatgaaaacctggaccctgcagaaaggatttcctttagtgactgttcaaaagaaaggaaaggaactttttatacaacaagagagattctttttaaatatgaagcctgaaattcagccttcagatacaaggtacatgccctctttcttttcatgccatctcttttgcactctcaggtggaaatatttttaagtgttttataatcataagttcttgtgaaacctaacaagattatcccttcctaggaatagcttaaccttcctaccaaattaaaaaaaaaaaaaatcatatgtaactaattttccaatgttttctctttacagctacctgtggcatattccactatcctatgtcactgaaggaagaaattattcaaaatatcaatcggtatcattactggataagaaatcaggtttgactataatgacagttctgattggaaatggcataattttaaaaatctgatcagagtgcatatataagattacactttccagtgtgcacactctctgaactggttttatgagttgcatatgcaagatgtgactaatgtgagattgattctgtatatcatgcacaaaactggcttttagccatgtgaaataaggtacaaaaatttgcagagaatgtactggcattcctgaaagaaaatagcgaatgccatgtttttatacccaagattaatattttgttacaaaataagaggagtttcttaaagtatcctctgctatctactgtctagggttgggctgaggcaactgcattttaacaagatacaccctaaatgatttgtgtgtataattgaggtttattcatgattggatttagagtaaatagttattgcaatatgccctgcagacatagtatatgttttggggaacaagaaaatggggcatgaaactatgataggaagggggaggggaatagtaaaatataaacgtggtgtatgctgacctacaatataaaaagcaattgaaatgtaattttgggccatttgttaaataccactatgaatgtcacaccacatatcttccttttaatttacatcctaaagaaacacaaggctcttgggttctgtaggacccgttagtgatgctttggattgaagaaaagggaaaatttctcgtttgaatttggatctggtgtcaaagcctatatttttgaggggtgagtgtagcttagtggtaagagaatgagactttagagactgccgggttcaattcttagcagtaccattgatcacttatatgattttaggcgagttatgtgagcctcattccctcagctgtacaaaagagatagtaattatacttactttatgtagttgtggtgaggattaaatgagttcatttatatgaagcacctagaacaatgcctggcacatattatgtgctgtattaatgttaactatcattaacgttattgaaaaagtaaatctttaatatatctatattacataaaaccttgaaaatggagagcaaatcttattaccctatcaaaactattcttatgattatttgtttatagtcatttttaataaatatttgtacttagtcaaaatcattatgtatatatgatttctgtatcttgccttttttaacttaacatatatagtaattgacttaacctacttgattcaccatttgttgttataaaatattgccttaattaaatatttcaaatcttaaaggtttttccattatatgaaattttttaaggaatgcttttcaaaaatgaagactgcggtaccttttgtgatttggtacatataaccaaatcgccctttttattgtgtagttacagttgataatgccacctgaaatacatgaatgtgccagtttcattgcagttttaccatagtggagtgttaaagcagcaacaatctaattatttaaaatcctagtggtagttggtaatgtcatcatatctttgatagcatagctggaagtacaaggaattgctactgtctttgagtaaacaaaactctaactttgaatgagccgtaaaaggatagtctctaacccaagagagaacaaataaccccatctccctatatcctgaagcacagctaaaacatggctggagtatttgcaagaaactaataaggaaattttgcaaactttctgatagtatattaattttcagtgctattagaaataattgggcaataagaaatctgcttttattatctgttttttgtttcattggttgatttttttgtttgttttttcttgttttttttttttttttttttttgagttggagtcttgctctgttgcccaggctggagtgcagtgacaatatcatagcccactgcagcctcaaacccctgggttcaagcaatcctcctgcctcagcctgccaagaagttaggaccacaggcatgtatcaccatgcttggcttaatttttgtattttttgtagagacagggcctcactatgttgcccaggctggtctcaaacccctggcctcaagtgatcctcctgctttggcttcccaaagtgttgggattacaggcatgagccaccgcacctggctcctctttactctttttttttttttttttttttttgagacagagtctcgctctgttgcccaggtgagagtgcagtggcgcgatctcagctcactgcaagctccgcctcccgggttcacgtcattctcctgcctcagcctcctgagtagctgggactacaggcgcctgccaccatgcccggctaattttttatatttttagtagagacggggtttcaccatggtctcgatctcctgacctcgtgatccgcccacctcggcctcccaaagtgctgggattacaagcgtgagccactgtgcccaccctcctctttactctttacctgagtttattctgagcttgttgagctctttttgagagtttaaccccatagactagctcatattttactgctttagccttctaggcccttacctggcattctgtgcttttgccgcacaaaaattctatcagcaactcaaacatgccatactgcctctttaggtctttgcatatgctattttctctccttaaggaacacccttgcctcctcactccctcggcctactcctgtttattcttcagatcttagctcagccattgcttgctccaggaaacctttccttccctgaagacagtttagatgccctacttaggttttttaataacattctctacttctccactcataatatactgtaagtactgttcactcatatctatcctcatattaggtatttccccccattgacggtagtgatcatggctatatgaatcactgtaaatcacttttagcacttagtaggcacacaaaaacttaatgaattagtaaattttagtccataatgaagtgactccagtctcactataaaaatttctaggaaaagaacatgcaaagcctgataaaatgatgttttctttttctcttcctcttcttagtaaagaggaatatacaaaattcactagaatataattgatttaatctagagctggaactgggccaatacatgatgaaagtagtgtctgttacttcctcttctcaactgtgttatttcccttgctgctgctgctattttaattcctgccatttcgggtttagagagtccacatgaaaacttctgtccttacgtttgaccctgaggacagctgagccttcttggttcctaatgctccagtgagaattactcttaatttaactgcatttttattttttctattctcaaaagaaaggtagcagagagggtgacttcaggcttcttttatgctgtaatactttagtatagtgtattattttgatgcttgatggttggttaaatctttaatatattttctttctttttttaaatatattttcatgtgttctaattcaagggttgttgggttagttcattagttcagttgtatataggagttatgtttggtcaatgtatttgtctccttttctcacatacatgagttttgaacaattagtatttattgtgcacaagaaatgctgatggggccatttttccagtttacatattgaggaattatattttttaaagtttccctcttccctttcttcctccctctctctctctctttcttatccacattttactcagacctaagatctttaactataggagattttcgtattaaatctaatgcaaaacattcatgtttccaaatggatatcactatcagaaatactgctgtgaaagttaaagatatgtcattggaagaaaaggtaattaggatgaaagaaggaagggcatatagtaattaaaatatttatcatgtgccattctctgctcttgcctttttttcccctaataaaggagaaagaaaggggtattagagaagggaatgcttttgaacaggagtgataaagttcaatagcatgtatgatgctagccctctggagcaaactgtacaggaaattttgtaactttgtagtaaaaacgtgttttttagtttcagaactttagtttttttgtaaaacagtagttgattttcgtagctcattgacaaatggtttttaaaaatcactgttagattacttcatctgggcttctgccatttaatattgcagttgctcactcttttttgctactcaatagactgaaaattgaagtgttaatctgttgatgactatagtaaattaaaaacatatgagggtagcttcatccacgtttgagctgtaggatgtagttacttcccttgtgtgcaaagctattatttttcaatacctgtggttttaaggtccaccattctggatcattcagaagaactgaaagagactaatgatgttgattctttaaatgataactctgtctgtctttgtgctgttggctgtactgctttatgttgtgtcatctcgatgacagtaataatttcaagtatattcccagctgtgtccctcctctttaccatctggacttggctaggtttacaacatggcaagctgcttatcaaccaaggtattccgtatgtatttcaatgttttctgcatccatctagtggaacaattgtcatagccatcatttcttgtctccttttatgggcaagggagacttgggtctctgtagcccttctttctggggttgtttcttttctttacgtttgtttttattagagacagggtcctgctctgtcacccaggctaaggtacagtggcatgatcatagctcactgcagccttgacctagtgatagttgacctcaagtgatactcctacctcagcctcctgagtagctgggactacagacatgtgtcaccatgcgggctaatttttattttttgtaaagatgatgtctcactatgttgtccaggctgctctcaaactcctgggctcaagtgatcctcctgccttggtctctcagagtgctgggattacaggtgtgagctgccatgcccagccctagggttctttcttgataaaagctccataggatatagtgtttggtgacctggagagtgttgatatttttggattagctaatgataaagttaatttccttagtcataggtttgctaaaaatggcttcaacttggagcagccactgctgccatcacaagtatcccttaaaactgcattctgcccttgaaaaaggaataaaccttatttaactgatctttcccatctgttgctgtatcagcaatataacagaaataagtacggaatttttttagtaagaaagactgcttagcttattatgtcctgttaagacatgatcagaatgtctttttcatcttaaacatcttttgcagtatcgatataattggaataacaaagatattaagggcatctgacacatttgaataattcatgtttttgaaattgataaatcctaaggtttcaggtactaatatataatctttagtacctaagctaaggcttcaggtactaatatataatctttaggttgaaaacatatttataaagcattttatataaaaaaccttcactacagaattataatgatagtgaacattttaaaacagcctaaattgttcaaaatagattggataaacttgaaatgaaatattatgaagatatttgaacactgcttatgaagacaatggaaaaatgtgcggggggatctgataggtgaaaaaggataaaataaatgcatatagatctgctgtataaaatattaaaaacaagtataagacaaaaacttggcaagaagtacattccaaaatgctatcatcgtctgagtttagattattcttatctctactcttctttttcttacaattaaaaatttttttaagtatttgttactttaaaagggggtaaaaattatataataaatatctacaaacctttgtctacacttgatttaaaactatttattgtgacatagtcattatttattcattcactgactaattcagcagtatttgttgagtacctgctaggtcattgttataggggctgaggcgttagcagtaagcaaaatagtaagcttatgtagcttatattctattaaataatagtaaacctcaagatgcttagaagcataccccattataattaagtctacatccttgttgccaactttaaaagacatttcttcattagcagttttaaggattttaaaaattcatacatatattttgtggtcagttaactctcagcgcttcattattggtacattagttgacataattccatggaaatttctaacagttctctcagcatttatagtagagaccccagaagtgcctatcctttcctattgttttaacccaattatttcttatttgtcccttatgcaatcttaagccttccctaatgtttattttgctagctttaaataatgtgacttttctaaatggctttgtttgttcttcctttgctaacatgacaaaagacagaggccaaaatgggacacattttacacagttctctcactgtcttcccctgctgcctcatcctacacctttactttctccctccctctttcctctagccataatgaacttgggagccagttcagtgcatggataacatgtatactttctctctgggccttgagcacttgggttccctactatatcttcttcacttggccaacacctacatattttgaggtctcttagaagaatgacaacttagatgtcatttcttccaagaaatcgctcctaactttccctaggagagggaagcattttttctatgtgcattcgttgaatgctgtcttttctttttctgtcaatagcgcttgtatgatattgtacttgcctgtttactttagactgtgagatctctaaaagcagagacatatctaccttgttcaccatttgatttccagcacctagcttacagccaatattgcacagtaaataaataattgttaaatgaatgtcttgaccttcactaacgtgaaaataactgtacttggagacaggcatttttttcttactagaatgattaaatataaaaataaactaaaaaacaaagcactcataatttttttttcttgtccaattgtcttctctctcaatctctcatttttttggtttccattaggtgtcatcaatcttacagaagaagtgctgtgggtcaaagtgaatataaacatgaatggttattatattgtacactatgcagatgatgattgggaagcactaatccatcagttgaaaataaatccttatgttctgagtgacaaagaccgagccaaccttatcaacaacatctttgaacttgcagggtagagtatacttagtttgagattttttctttttttaaacaaatgtcattgaggtaaagaacatatatgaaaaacagtttgaaagaactagcatgtattggttggtacaatacattttggaggattgggaaaatatgtgttctttgcctccagggactttataaaacattagctacgaacatactgaacagttaaatgaaacaggatttaataataattcaagactagatatcaaaaacaggatacatattttgttgactaaacttgatacacgagttcaagctctattttattttataagagaattattttcaaacagcagttggtttaagcatgaagcttagtgcttatgcattggttttgagggacatctctgatggctggagccaccttatctgtactgcttgcctccccaaccacctcatgcattatagaatcccaaagccaaggatgacagtgacctcatgtaaacatattctctgaatagaatattaccaatttagattgatgataggcttaaaaacactgacgtgttccttctcatctccctgggcatttccattttgtctcgttttttatgaagtgcccttcttacgtcatcctagccattgctgctgtgattcctataaaatggttaattttaaaaatgtactcactgtaaattcacaatagaccttgtcataacaagtttgaaaaacaaattcccattaaaccaacaaataaaattaaaaaaaaaaatcagatactctctatgctatactctctttcctggcaaatataactaattaataaataaaattagtactattcatcttttctaacccaagatattatacttttgctgagttagtagcaatttacaggagacttaggaataaaaaaaaatgagctattgtttatctttctcttgaaatgcctctttaatcttgggcctcatgaaattaatcagagataatcatatttagcttaactttacaaaatgccactgtaagtttaaatttttggtctccaagactcaccatctaaccctaagtttctcttttagcatgcatagacttcttctgtgtgtctctgcatatttacttttcctgttcttttatcctttagcctaggcaaggtacctctcaagagggcctttgatttgattaattatcttggaaatgagaaccatactgcacccatcaccgaagccctgtttcagacagacctcatctataacctccttgaaaaactgggatacatggatctggcctcaagactggtggtaagtctgcctttttgccagcttcttgctgtttatctttaatattgttattcatggttccattttcagccagtaataggctgaaaaagcaaccagttaaattccattttcttcactttcctgcttgtgaaatctttacttaaaatcaagatgttgcttatgatgaagagctgataaaggcttagtatgatatggtcttgtttgaatatcaaaatacagacatttgacaccactgtcaaaatgaggtcacatgagaataatatttctctattcagatcctgttttatttctacatgatgaatgtttgaaataggcccttttgcaaagtagatctccccattaattttctagtggtcattataaaatgacagttacgtttgtattgagaatattctgtttaagggttcttactgataactatctaaaggataatgatgctggtggatatgtttctttgcaaagcactaaaggagtcttagtattagagaccattttacctttcttaatatcaactgcctgatcttaacagttgttattttggatacttttaatattaaactgttgagagactttaaaagcttggaagagagtgaaaaattatttgtttttatctaattctctgaatcagcgcattttgacaacagagtttgctttataaactagtgagatttcccagggacccaggcaaaaggcagcttttagggaaaggaaggcagtattagaccaagaattagaataagtcttttggggttttggtattctcattggtgaaaggaaggggttggattaaatcatttttttaacattttttttattatactttaagttctagggtacatgtgcacaatgtgcaggtttgttacatatgtacacaaccttctttctgcctctgttactgccttaccctgcgtctcctatgaacagttctctcatcacctgcatgattctcagtgaatggagggaacgcagggcagagtggatgtatggagcttgaaaagcttttctcccccaaaagtttctgatctgaccccaaaggagttaccccatccctatccataagcaagatgcttaagttagatgattttctgaggtctcttctaatggttaagatttttatcattttctatttcataaggctttcagctagcagccttaataaaaaccagtgcctggaacatgacctggcctgtagtgacactcagtaaacgttgagtgaataaatgattgaaacacaccagaaacaagtgcatttgagtgcttttacacaccgtgcttagtgcttaatgtagattacctcatttaattatcacacagtgccaaggtagatatttctacccccattaaataaacgaggagacggaatagcttctttaaagtcacttacctagtaagtgataaagctgaaattcaaacccagataaatttcactccaaagacttctgtttctgttatattgctatttgtaaaatcaatttgtgtcctagcaacgtcgtctttccaggatacctttagaaaaattaaagctttcttcttgtcatattcttttgaaaagcttgcagaccatatatttaaggtttcaagtgactggcccacatctagttgttctcctaaaaatgaaattgtcaacttaagagattttttttatatctaaaatgctaataatgactttttaaaacaatatttatgtgcctttccaagaagtatgcaaatagcttactcatctctttagggcaaactgggaatccaatatcgactttctagtgttagtgtagtaaagagattggccattagttaaccagttcagctattgttgatagacatttgcgttatttgtagtttggagctatcatgaatagcactgctatgatgtcttcgatgaatgtctttatgcatttctatgggatatatgtctggaaatgggattattgagtcataacacatgcatagttaatagtgtactatcaaatagttcttcaaagttgtaccaatttacacttagcagtatatgagaattctaggtgctctagatcttttctgatgattatcattcacactaaatcttttttattttagccatgtggataggtgcatagtggtactgcaattttgacttgaatttacatttttctactgatgtgaagatgattttctttttgatatatgtattgaccattagatgttcttttgtaaaatgcccatcttttgcttatttttctattaaatcgtctgcctttttcttgttgatttgtaagagttctgtatatatcctagatatgaatcttttgttggtcatgtatatttgcaaatatcttctcccactccatcttgcttttttttactctcttaatgattttttattaatatgagttttaaattttaatgtaatctagcttatgaaatcttttcctacccctagatattctgtgttctcttctgaaaactttatcattttatcctttacatttagatctgtgatccatctggaattgatttttgtggatggtgtgaggtagacaccaagattcattcttttcagtatggatatccagttatccccaggaccagtatattttattgcatagaattatgtttgaggtaattagtatgatatcaacaccatttggggtagtatattaattttctagggctattaaaacaagttattgcaaacttgatgtcttaaaataacagaaatttattctctcatagttctggaagccagaaggccaaaatcaaggtattggcagagtaaggtttgctccttctgaggaagaatctgttccattcccctctcctaacttcaagtgattgccagtaatccttggtattcctgggcatgtaggtgactaaccgtggcctttgtctctgtcaacacagtgttctctctgtgtttctgtgcccaaattgccccattcttagattaaggcccaccataatccagtatgacctcatcttaacttgattgtacctgcaaagaccctattcctaaatgaggtcatattcataggtcccaggcagacacaaaatttgaggggatactattcaacctagtacaggtagcaataaataagattagtgcatatcactcactttttttcactattaaagggcaatgttagttctgaatataccctgtgaggaggcagaatatctcccgactctgaagctgcccagttaaacttcataatggcagaagtcagtcttctgcttgcctctctgttaactctgtttatagcttagtgctcaagaagcacttgatacttacctcttctttgaactgcatcttcatcccagatgatttccagctttctgggcagatatgtgtttattaggaacatacttcaaggagggatctagggactgatggatagagaggaagggcagaagacttagtatgtgtttccaagattggacgcccttttactgctgtgtgtcttcacatggttagctaaaagcccagttaactttagctcaccaagagggagaatgtgtcactttaacattcttattctaatattagggtgaaaattctggtagcatcaatactctcaaactaggaaatctgacattctacagttaggaattgggataggagacatttatgaatccttggatatgacgttcaaatgtattactgtctaagactgatttctaattaacttctatatcattggaaccaaagcattatgtacatttattggtcattttgttatgtaggctgcacatgacatatgctgcattttgtgatgctgtagtgttgtgatgggtagggtctggaggcacatttcaattgtgttaaattgttcacatctgatgttaacatctgatcctagccatattcctgttttatcacttacaaatctgtcattcttttacatatgaggcattggtgggataaaccttttgcaataaaaactgacatttcacttttaagaaactcagttgacccaggaaagaactccctgggcatatcagtgtaaaattaaagcagtaaatcaaaatgtaatatacaacataagtgctagcatctttccctgttttatttttaaaataattttatattgttgttattgcattttattacaaatccagtgtttgtagcttgtataacccatcaatttatttcctctctccacttgccatttcactttgtaaaatcatagagttgcattctattgttgaaagagcttaaatttcaaaaaaattaatttggatccttagaaaaacatttcattttatttctaaaagggaaaggtaatttgaagcacatgctatgcctcattaatattaattaatattaaaaataaacctggattacttataaaaatgatattttgtaacaggatttttctaataatataattattctttcttaaaatgttttactttattatgttataatttgaaatacatttaaacaactattttgagaacttgccttaatgatttcatatggagactaactagtaaaattgctccctgtaattcggtggtgtaactgctcaggaattagccacagccatcttcaagtgtcagatttcctttgcttccaggacttcaagtgccattctttccattgctgcctttgtgttttagtaaactctcaatgagtattgccattgttcttcactgattttttttttaaataggatttcaagcatgtgattttttttctcacattcttcatttgttcctatttgacagttatgagtaggatttgaatttcttttgttctccagtcatttggaatggttttctatcataatgctattgagaaggtaaggccagtgaagacaccacatagcaatgcagttaggtatgtcaagtgggatcccctgcattgcttgtccgttccttgcatcgtcagcgtagcaagtatttttctacttcatgtcctcccagtgactcaaaagctttaccacttacacattccacaaggtgtctgttctgtgtttcattgcttttgaaacaaacacaagcgagttgacatgttatacaaaccttgagttcttttccttgcagattctttttttctattctcatattcaactccacaagatgcttattcacagtaagtcattgctaggataatggtcttaatagtttaaaaatttccaaataggattcattttaggtattgacagtggtactcagtggtactcactgtcaatacctaaaagaaaggaagaaagcaatgttctgtgaagaacttgagctaaacttctgaagttaagggttttgcttgtggtcatctgtggtacatgattacttgagatgagatgccacgatggtggtggaggtaaagaagtaccagcaggaagaaatcttcctgtgcttattccttcagagggggtatctgttgaatttttttcattttggtccttcttatgtagccatgaaggttttctaaagaatacctaaaaacggccaggtatggtggctcacgcccgtaatcccagcactttgggaggccgaggcaggtggatcacgaggtcaggagatagagccatcctgactaacatggtgaaaccctgtctctactaaaaatacaaaaaaattagccggatgtggtggcgggcgcttgtagtcccagctactcgggaggctgaagcaggagaatgacgtgaacctgggaggcagagcttgcagtgagctgagatcgcaccactgcattccagcctgggcaactgagcaagactccatctcaaaaacaaaaaaaagaatacctaaaaacattttttatatcagaatttttattctttctagtggtattcataaaagcatattgcatatgatgctttttaaaatatcatgtgccctcaccccccacccgccatgcacaacttgcagaatggaaatacttcaacatggtattaacaggtttggtgtttttattttggagagagatgaaaaaggcgtctgttagtaccttaataccgcaagtatacgtttagcaatgacagccaataccaatggactagattggatgatattaatgaataactattagttttcttcagtgtgataaggtattatggttctgtaagagaatgttctgatatctgtgagttgcatgccaaagtatttataaatgaaatatcgtatctgtatatcacttttatattgttcagctaaaacaagaaaaacaaatgtgtgcgtatgtgtgttatacacacttgaaagtgaagcaagtgtcagagtgttaaaaaactgttgaatctagatgaacagtgtatgggtgttgtactatctttttttgtaggtttgaaagttctttaaataaaaacttaggagaaaaaataagctataaacaactattcttccctgcaggtctcattttcttgctaatttggttaatttgttataacatcaaactagttgataatgttaaatatacctttaatattggattgagaaacatttaaacattaactatcaataaagaagtttatttttctttcattgctttataggtttatagattgtaaagtcacaaggtcaggaagtcctgacatccttccagcagtggttataagtgatactttttggcaggaaaataacttctagctgagtatatgcagcataaaggttccctactgcacagaagtcattaatttttttctgagttaacatcactaaaagtcccccttagctatagcagccttatgcatagccttattattgaatggtttcatcccagccgtatgtgggtttcatatgtcagttgatatttaatgagtaatatctatgcctttttttttcctcattggataaatgttggggaaaagagatctaattgtcctggggttttttttgttttttgtcttttgttttttttttttttttttttttttttgaggcagagtcttgctctgttgcccagactggcatgcaatgatgctatctcagctcactgcaacctccacctcctgggttcaagtgtttctcctgcctcagcctcctgagtagctgggattacaggcacgaccatcatgcctgcctaatttttgtattttctacagatgtcgtttcaccgtgttggccaggatggtctcaaactcctgacctcaggtgatctgcccgccccagcttcccaacgtgctgggattacaggcacgagacactgcacctggctgtaattgtcctgttttttttctgattgtcctaattattatgaagccattataatctattttgtctctctagactagggtatttaaattacttcaaaaccaaattcaacaacaaacttggactgatgagggcactccatctatgcgagagcttcggtcagccctgctagagtttgcttgcacccacaacctggggaactgctctactactgccatgaaactgtttgatgactggatggcatccaatggaactcaaaggtgaagtatacctctactcagatgaattatcttctttttctttatttcacatcatatacagtatccagggtattctcatcctggatcataaatgttataaaactgagtgtcagtgtaggtgaactctatgtatctgcattctcaaacaagactttttttttttttattatactttaagttttagggtacatgtgcacaatgtgcaggttagttacatacgtatacatgtgccatgctggtgtgctgcacccattaactcgtcatttagcattaggtatatctcctaatgctatccctcccccctccccccaccccacaacagtccccagagtgtgatgttccccttcctgtgtccatgtgttctcattgttcaattcccacctatgagtgagaacatgcggtgtcaaacaagactttttaaaaaattgtggtaaaatacacataacataaaatttactgtcttaaccattttttactgtacagttcagtagtgttaagtatattcacattattgtgtactatattttcagaacttttacatcttgcaaaactgaaactctgtacccattgaataattcctcactccctctccccaccagcccctggtaaccactattctacttcctgtttttgtgaggttgactacactgtatatctcatataagtaaagtcatatagaatttgcttttttgtgactggctcatttcatttaccataacgtcttcaaggttcttccatgttgtagcatgcattaaaatttctttctttctttcttttcttttttttggagatggagtcttgctctgtcacccaggctggagtgcagtggcgcgatctcagctcattgcaacctccacttctcgggttccattgattctcctgccccagtatccggagtagctgggattacaggcatccgccaccacacctggctaatttttgtatatttagtagagacggggtttcaccatgttagccaggctggtcttgaactcctgacctcagaaaatctgcccacctaggcctcccaaagtgctgggattataggcatgagccaccatacctggctaaaatttctttctttttaaaggctgaataattttccattgtatgtatataccacattttgtttatccattcattcctggatagacctttgtgctgcttgtaccttttagctattgtgaataataatgccatgaacattggtgtgcaaatatctcctagagaccctgctttcaattcttttggaaatacacctggaagtagtattgctggatcatatggtaattctaattttaattttttgaggaactgccatattgttttctacagcagctgcaccatcattccaatttctctacatccttgccaacacttgccattttctgggtttttgatagcagccatcctaatgggtgtgaggtgataaacaagtctcttaatttagaaataaaacatagcaggtagagttagcagttaacagaaaagcttttgggggtaattagttctctccagctccttaccgtgcattatggagagaagattcaagcatcagatgaagagttggggtggaggatttggataacgttttgaggtctttcccagctctgagatcttaataaaggcagtagactgtgttttctccctgcaccccatttactgctatagttctaccatgaaacttatcacactgaattgtaatgcatatagttattgctctatacttcgtagtagcctgtgagttctcagaggacagaggctctcattccttttccgctccctagtgtccagccagtcgcctgcctggttctttgtgagtactctgtgaatattaaattgaactgatgtatccatagacacactactaggaagatagcagtcactgaattaaactttttctcaaccctaaattgtgtactcaaacttgttattattaccaaccctcacaccagaaactccaccacagccaactcttcgcctttgtattcagaatattttcttgttattctcatgtttgaccacctctcttacagcctacctactgatgtcatgacaactgtgttcaaagttggagcaaaaactgacaaaggctggtcattccttttgggcaaatacatttctataggctctgaagcagagaagaacaaaatactagaagcacttgccagctcagaggatgtgcggaagctttactggtatgaaatcaccgaggaatatgatatacagaaaccaaaagaatacaaacactgtgctcttggtcaggagctcatttttgaggggatctcttttccccacttctgttacaggccaggcctaagttggacagtgtggtgaggagactacaggtgctgggctttatctttatggacaagcagaaaatcctttgcccaaaagggattacaagatgtcaggagtcacagccccctcctactccttgctcaaaaagtcttcctccccttggaatgttgtcttatacaccacaattggtactccatagtttaggaccaaggcattgctttgtgcaagctgtcattttaaaaatgtaggcatttcagaaaaaaaaaatcacatattaaaccttctaggttctacgttcatatgaatttatttgtcagacttttcctttttaatatgtagtgatgaaggcccagaagtaggagtgtcatatggatgaaggtagggcagtaagtagggcctcctgacaggaagaacaggcagtggtggggtagaggagctctacatagccaagaggaatatagaggtatctgctgtagagagcacaggtgttagaagtcgcactgaggatagaaggaggcttctgggtctcattacttctgttgtatgattttgctcagataaatcttaatagtgtcccagagatgtcctcagtacctgtccagacccacttaccaaaagatacgctgtaaatagtcattttctttaaagtattagccagcctctgacttaagcaaatagagaaaaatcactgtttttaaactatgctagtaatacactaagaatgcccatgataaagaatttaaacagtacctaagaatatagagtaaaatatgaaagtatttctcatgatccttcacttccattctcgttttctctgttaacaacagtgtcagtcctggtcttcgtattcatctgtgggaatggatatttgtacatatgtacgtacatacatacacacatacctacatatttaactgcattttaaaaaccatattaggtttataccatacccagtgttttgtgaccatctttttagtgaatgatcagtctatgagattttccatgtcacttcatgaagcctgctttatatataaaaaaaactaaagtgttttatgggttcataatattctgtagtatggccctatcataatttatttaatccatcacgttttgttgggcttttgtttttttctcttctaaaaatactgccacagtcttggagtggggcgtggtttctcactataaacagatagtatagcatagtagatgagaactgcttttgttcagatgtcgggctttggtatttattactgtgtgactgtgggtcaattagataacctcagtttcttcaactataaaattgagttaggtagtattaataaatacctactttatagcattgttgtgtcaaggacttagaacattatttagtacatagtgtcagtaaatgtttgctacgaacattaataagagtatattctgaaatgtatcctaattttcaaataattcaaatgacctagttttttttaagaatagtaatataattaacctgcccattcaaatcaaataaggtttttaccagaaaaaaatacccacctcccgaattgtaataaattctaccagaacttatttcctaaatgtttttactatttaaaaactatttattgtcatgtgacaatataggtaaatgcctattttattggtgagttctttcttcatttaaaaaaaatgacattttcaatctatagatcaaccgtagactaatgcaacagttatttctcaatttgctacacagctttaattaggaaaccatactaattttaatttaagttcagtcatcacttcttcatgaataataattttggaggctaaatctgctttgctcttcaggttaatgaaaagtagcctgaatggagataacttccgaacacagaagctgtcttttatcattagaacagtgggtcgacattttcctggacacttactggcatgggattttgtcaaagagaactggaataagcttgtacagaagtaagtttctcagagaattattaacttttagtattctcaagttgtgcatttgaaaaaagctcccagtgttttggctcacagaagttaggatttgctgtgagaggaaaaatacttccatgacagtttaactgaaacatccggaaattttcacatttgttaacataattccatagcatgaatcatttaacagtagcattccatctaagttctaattaagcctagccttgcttggcaccaggttacttagctcagcgtggctacagactatttcatagcaaccatttagctatgcatattgaaaaatacctctgtatggccgggcgcggtggctcacacctgtaatcccagcactttgggaggccgagatgggcggatcacgaggtcaggagatcgagaccatcctggctaacacggtgaaaccccatttccactaaaaataccaaaaattagccgggcatggtggcgggtgcctgtagtcccagctacttgggaggctgaggcaagagaatggtgtgaatctgggaggcagaacttgcagtgagccgagattgtgccactgcactccagcctaggcaacagggcgagactctgtctcaaaaaaaaaaaacaaaaaggaaaatacctctgcattgccaaggcatcagttaagaactcacattcagctagatgcagatgtaggttttttgcttctttctctcttttaaatcaataatggcatttctgggtgtacagtgtgatcttcgacaatgttaagcggattaattgtctgcatgttctgaactcttccctttttctgcccacctttccttcccaccgacaataagtatgcatagggctaccccggtttcctcagttgcagttccgggaggaggattccactctggctttggcattaaagacttttccttgcactcaggaacaacgctttaccagcagctgcctaatttttttgctcttgtttttgtgtttcttcaggttccctctggggtcctataccatacaaaatattgttgctggatcaacttacctgttttcaacaaagacacatttatctgaggttggttttataaaatgataatacagagactgggcaaccctccgcacacccggaccaggctgctcagttttagtgagatggtggattttcatgctaattccttctcttatctctgtcttcctttatcagtactaatgattctgcattgtgattacttctagagggtggcatatatgataatgaggaaaaaatctgattccattctcttcccttgtctccctaatacaaataatttaagtggtcataaaattgtttggaagaattgcattcttggggtgaattcatagcaccaagcctttggactctactttatttattgttacttaaacatctccttggttccattttaagttagaaaaatgtatctgtgtgggagtaaaaagatttcctttttaaaatcatttcagatatcaccatacttgattgggaactccatgtagataccttgaatattaaagtacttctttctactgctttcaagatagcagcacagccatcactaagttaaagcttattttaaaagctggggttacctgaggtttattgtccttttcttcttttgaaattcttctgtgtgaaacttacaggttcaggcattctttgaaaatcagtcagaggcaaccttccggcttcgttgtgtccaggaggctttggaagtcattcagttgaatatccagtggatggagaagaacctcaaaagtctcacatggtggctgtagcatgcacaaccgcacctcattttgttgcccattcagagagcttgtaagcttgggctctgccgcttttgcaaaagccaaggtaaagccaggatcgctgccaagttgtttgcactctttggagttctagttagctcagggcctgactgtatttttcatccatcttttctgaagtgtctttgggcagtatgtagttatttattacaaaattatattcacgtaaatgccaaccatctacaaaaacaatgagtaatttttctactttgaagatacacagatggggacaaaaaccctgttttggaattctgttctattcctcagtatccagaaagttactgacacagtaaaacaaggaaagttctaccctaagagccgccatcacttcaggccgctggtttgtcagccatctgttgcttcttattgatagatggcattggaatgtggtacaaagttagctctgaagaatatggtaacgaagacaataaagcatgcactgtaagaactgacctcaggtgtgcagatctactttgatttggggttttgattaattctttatttttctgaaaaaaagtttaaataatgtctgtaactattgtgtttttttcctgccgaatagccaggtgctacagatttttaaaatttttgttgtattgaaaagctaaacaaggccaaaaggttaaattttttgaatatttaagactttctttttcatcttttatagcgttaccataggaaactgttccaaactgagttagctttaattataattattttattcataaatggtgatagtccccagatctgtacacctttatcactccctgccgtagatatactttaggttagtatttctacattcgtggcaagcattttggtaacaccagtggttttcattgtgacttttatcactatcactaagaatgcaatttaagttgccttttggcatcatagatcatagaaactttctctctgaatcatacccatgtgtgaattttcattttatatgatagtgtagcatattagaagcatattttaaaacagagcctttgagaaattgaaaaacaattatttgaagttcaccatagtaccttaaaggaacaaagagaatgtgggataggagtaacttgaattcgtgtttagtatggtgggctttgaatttttttcactatcaaaaatagtgcttttgtttagttaaaaattgtagtttttctttttttgtgtgtccaaactaacataaaaggagtggtcaaagaaggaaagaagaaaaatgagggaggatgtccgaaactgtatggcattttactccttctgaaagagaaatactgtacttgaatttttgagctatgcagacttatacctagattgttgtgtttctttgattcttaggagaaaagctttcttcctaataattcttgagaactttatattttgtttgaaaacagtttctatgtacataaaaagggtatttacccatttgtgagcacttaaaacactccacagagtcagacagtgggaaaggtcaccctttttttattcggcaggtatcaagttagaatgtatggaattgtgaataaaattatattttattttatgaaaatatttttatataataaaatttaaaaggctggtaagctaaaaaaatagtcttctttaatcctagtgtgttttccccaatttagtcttttctaaaatttatctgttttagagtagaaaatattatatcctgagaatcacagaatcatctaaatatgtcttattcaactgaagtgattgtaagtctttattcttgtgctttggttaaatgaatgataatttagttgatagtgaaagttaatgtgtttttatatttttagagtgagggaaaaatactaaacttttgagagttttgttgtcgttgctggttttttaccatgtggtactaaattccactttgatacaaaatttaaattttgtaacttctcaaaatcacttaagattcttcagttttacctgtgcttcttgacatcgctcctataatgtatgttagttaactctgcatatggcaaatcttgtcttgaattatatcatttctctccctctctctctctctctctgtgtgtgtgtgtgtgtgtgtgtgtgtgtgtgtgtgtgtgtagtgtggggggtattgttatgagtaaaactttatcaaaacttggcctgaaaaagagataactcatgatccattgctatctttattactcaaaggctgttcattcccataataccagatccataatagttgtagtttttttgatgttgttgcccttaccttaattatttgtagttttagtaggccttgcctcagtttttcccacagaattccataattttaatgttgaactaacccatctatataggacttctaaaaactacgtcaggaatgtaaggttaaatgagaggtagaacttgtagtgtaataggtataatggtagctttcaaagttttatcttctcaaaacattgtcttagccagtgtatttctgagaactcagactgaagcacagaagtcacagtatgcttcttttatttaagcacacagattcatgacacaagtacttgttgaacaagtgttctcattgcagagagatctacttgaatataaaagggtcatcatactagattattaaaaaagaattggaaatcttgagttgtggaagaaatgtttatgctttggagatctaaaaaagttatgaatgtaggaattagataagtccagtttgttctgttaatataaaatggttagatatattaaactgcaagtagtatcagcttcaccataagcttgggccttcctccatcttgttttatttaagtctctttaaatgaaattttgttgtcattgtttcagcattcatgaactttcttactatcacaggttctactttaattttccttgccatatgtgtttccattttgtgggacattagccaccacaggaacacaagagttgtcagaagactcctgggtgtacagagcaaatcaagctgcatcagtattataggataccaaacagaatcctttctattaggaaataagaaatcagttaagtgttggctgggcgcggtggcttatgcctgtaatcccagcattttgggatgccaaggtgggcagaccatttgaggccaggagttctaaaccagtttggccaacatggcaaaaccccatctctactaaaaatataaaaattagctgggcatggtggtgcacacctgtaatcccagctacctgggaggcacgagaatcacttgaacccaggaggcggaggttgcagtgagccaaggttgtgccactgcactccagcctgggtgacaaagcgagactgtctcaaaaaacaaaaaacaaaaaaaaaagagttaagtgttgattttgttggattactgacagtttgttgagatggattttaaaaagagtctatttaaaccaaagtacctggaaccataatctgccatcagattgctaaacattcacataatccccatgtttcatggggcttcagggaaggcaaatacatctgagatgagccacctccaaggacagcatttcctgggctgcaaaactagatgtggattttgttacttaggcctctctaaaaactgaggccatggatatgacatagcttttcttctcacctatgcctttgttacttttgtatttattggaattaaatctctttttaaagagcttccttcccccttcatcccatttgtatttttaaaaactaagttatatatatatttgcttgtttttgcattcttttattttgtgctccattccctgctttgccagttaagtactacctgaaaagtagcggttcaaaagtatggtaaatctcctcccttaaccttattgcctgtgtgggtgacagctaatggaaaagttgatcgatttttttcagtggtttttttgggagtatatactttaaaaatgtacatacatgtttttgatagtttttatattatttcattttgtatatttttttcctgatgaagagtgatatatcatcctatgaaaatttcatctacccttcccattttacctgtatgggcagtagctacagactagttatttggtttccttctttggaagaaggtggtgatgttgagaggagagcaagctatattcttttaaaagtgtgtacagatgtttttgctattttgtgttatttcattttgtatttcattcatccattttgtggacgtgtagataaaacgcggtggtccaaaagcatgacagatgtcccctttgcgtttctccttattgttcgcatggacaataactgacagagtagtcctagttgctgttgttttgatctagtcttggggctggggttgtatattattctttcaagtgtgtataaatattgtgccacctttttatacttcattttatacttgtttccttgtatggatgcatatatacttaatgaaaattgaggttcagagtatgacaaatctcttttcccttttccttactgcctatttaggcaatagctaatagagtagtttgttttgttttggggtgtgggggagagtggagtatgtacttaatgtatataaataaacttgctactacattgtattactaatttggttcacactgtgtccttctcatggatgtgaaagtaccaatgaaatgtggagatctcgatgtataacagtctcccattctcctcatcccttattgactgctgggcagtagctaacagagtagttgtcaagtggcgtatttgaggtgagggggagggacggggaaggtaggaaaatgcacttaatgtatatacatgtttttactactacattgtattaattcatcgggtgcccagactgaaaggtacctaatgaaccatggagttccggatgtataacagtctcctcttttccctttcccttattgcccatgtgggcaatacttaagagtagtttgggtttattgaagattttttgctaggagagagaaaattttttgctaggagaggtttcaaggtaagagtatatactttaaacatgtatataaatgtttttgctacttttctgtcactacctttcttaccttgtcctttacatggatatatgaagaaaattgaggttcagcctgtagcagctctcctcttctgcccttcccttagattgtctgtgtgggcaggtgtctaagagagtagttgattagcttcagggattctttggtgggtgttggggtatatacttttgtatatgtatgtacatatttttatttctttattatagtgtttcattgggtacccggtccttcacttggatgtgtaggttcctaatgagccatggagttatggatgtataacaatctgttctccctttacccttttaatgtatatgggcaataattttaaagtagtttggatttttttaagttttgaggggtgggaggggtctaaggcagaatatatcctttttaaaaatgtatatatacttttcattaactatattgtattatttcatgctgtacccagtccattgcttggacttacgggtacctaatgaaacgtggaggtccggatgtatgaaaatctcctcttttcccctttccttattgcctctgtaggcaataattatagagtagtatagatggtttttcttttttatccatctgcctatctccaggaggatggggtgtgcacttttagaaatgtatataaatgttcttgctcctttttcctgttacttcattgtgtgccaaggcctttccatggatacttaggtacgtaatgaaaattgaggttcattctatgaaaaaatctccccttctccccttcccttattgcctgtcttggcaatggccagtagagtagttatttaagggattttgtttttttgtttttttgttttttttttggtaggggaggtggggaatttctgggtttgtcttttttttaatgtatataaaagtttgctagttgttgttattgttgttctttcactctcaacacagttttttgtttggagttgtaggaatcaaatgtaatgagggacccagacccgagagtgtggtaaatattctttgccttcctcagagcctgtatacacaagcaagtagtatgtgagcactacagggcttgggttttggttttttgcttttgagggttttaatgaggagtgggattgttgagaggaaaaggcaagatatataatttttttaatgtatataaatgttttgctcctttttgatgttaacttcattttgaatctggtcctttgtatgaccacttaggtacttaatagtaataaagttgagattgactctatgaaaaatatcccatactccccatccctcattgcctagggggcaatggtagaatagatgtttggtttcttttgggggtgtctgagtgtatatgtgtgtgtatatacacacaagaacacacatatttatatactatacacacacattttaatgtatataaatatttgctacattctgtgtgttatataatgtggtacccagtcctctgctgggacatggatgtacataatgaaacatggaggtccagacgtatgataactctcctgtttcccttccctcattgcctacaggggcaatagtttcatatcttgggttttttattgtttaatttttttttatgggaaggggttctttgggtgggtaatagtcagggggaaaggacagtgtctatactttttaaagatgtatataaatgtttcatgttattggttttgtacctagtcctttgcatggatatataggtacctaatgaaaatcgaggatcagtgtatgacaaatctcccatcctcccctttccttattgcctgtgtcggcaataggaagtagaatagttgtgtgttgtttacttacttgtctgttttagagagatttctatttttggtaggggaatattcttaatatgttttcatatctttatttcattttgtagtcttttgcatggctatgtagggacctaatgaaagtcgagtttcataatatgacagctcacttcttttcctacatatttcctcacttagcagtagctagtgtagttattttgtggttattttatttcattctctaggatctattccattaaggatgcaagtgtgtagatgcatatatatcatttgcttctttcttccgccattattttcctttaacacttagtcccttgcaaggggtctgactatacctaacaaaaataaagacctactaaatccctgccatctggctggaaggtgtagcagtgtattaatgtaactaatagcaacaggtgtgcagcagataagacaggagaagacactcagctatggttgagttgtgaaagctaattagatccagcatttcttatgttgattcagattgaatgaggtagtgaaaagggacctgtgcttttgtaaattctagaaaggcaagaggacaatattgaataaagctgtgtttaaacttcattgctcatatatcttttagtaactggtaaaccggcgaagctgataagccaataagagtgctgtctagaacgcatttgcaaaccgttaagagtagcttctttttgaggcctggacttctgattcatctatagaagtctattatgattccatcaattgcatagcttgtgtacctggtagaaattgtgtcttggaatgaccctttcgagttattgacatggctctgatgaatagaacatgagccccaaaactaaatccaaaaggaattttctatctttcatcccccacatgtggcaagacaagttggccctttcttacccagaggtcttttgtgtgactgcatctttctcctccgttctccattgtgtgctttccattttgtctttagtgcctatactgttaggtgttttcttcactggcattcacaaatttaagccattgctgcctcattagccttgtattttgtgtgcatatcatatatccagacctgtatgttcgctttaagcattcttatatcacactgtctcctcatctaccatatggtaaatgttaaaactccacatttgtctgcatcagggaaaatgcatgggcacacatcctccctccctccctctctgctctcctcccttccttcaggcctcttagcattgtttgttttcccatttctgatactactactccatgctgaagatttgccatattactattttggaaacattgagtgatagaactcctagaaaatttgcaaagaaatgttacatactgtatatcaaactctcagattctagtgttgaaaaagtagcctatactttgctattacttatacctgctgccatagaaaaaaataagtttattcatgacacatttacatttgatcataaataaaagaaaaaagggcacctttttggagttagtcatggtagtcattagtgatatttctgaacagttcttaatttaaaatacttcaaaggaagtaaaggtcatggcttagctgaaggaaatgctccagaaattggactgtgtaaaccatcagtacaataatacgctgtgtatgtatgtgtatataaaatgagaattatggcataattggagcatttgcattaatcaacaaactcacattgagacaaaacttagttttacagctgtcttgattaaagccaagtgttccatgttgctgtgaagaatagcctctttcaaatactttggaaagtagttacttggaaacttgtaaaggtattacatttttatatttaaacacctatagagatcttcaattccttgagtctgagcttgtgggtggaattctaaatttgtatcataatctgtcttttgtgaaacattttgaaaatatgtatatataatattgtatatgcaaattgtgttgtttcacttgtaaagggaaaaggcttatttttctttatatttctgataacttgttttgcatatgaccagcactgactgaaaggcatgtgtagctgcaaacactgttgctttttttgtgaaatgaaaataaaagtatttaaatacaaacattgtgtggactctttggattaatgtatatataaagtggtatctcttcttaggttatgacctctaccagggcagctcctgtactcattgtcttctgtggttagttttttatttcaccagtatccagtgtctttattgcatatacctcagttgacatttgacattcggaggtggctaattctttgttgtgggggctgttctgtgtatcataggacatttagcaggatccctcccatgccaattgcaactagttgccaatagtaactcttgtccccagctgtgacaactaaaacctctcctccagacattgccaaatgtcccctgaggttagggttaaaactttgagtggatgcatagggcggatagctaacagtcacgggagctccatcaggaccattatttactttttggactaaagcagttcttgtaaacactcaggtcacctaagtagccaactgatgcagtagtcatacagtacctaaatcagtgtgagaaatgtcatacgtgtcgtatgccagtgaaaccaaggaacgctgtcttactttgaaggtgagacattggatgttatcagggaaataccccttgcgttgattcacatataagtaggagtatgagtgcacctttttagaggcacactgccacggttacattcctggtcaggtctacaaaaggagtttcttggttctgtctgcatgagtagccttgaggaagaactgagaatttcttaggcttccagatatatgaactagaataagtattcttttacagtaattgttaggtgggcgtttgaaggcaaagtaagtcttaactcccatacccaaaatcctatttctgaggacacaaaaccttgatgcatgcccttttaaaatctcttataatgatcattactaatatataggggaaatgttcttaaaattgtgaagttttgatcaaaagcttctggttaaattttttgtgctttttaattcacagataccagcagtaaacaattgaactaaaacccattataaatgtaaagaacactttgattctgatagactttttggatggagagtaacaataacctatttttctaaattatttttagaacccatggtacagaagaatgattcagttgtatcttctttttgcttcttctgttcttacataaagccccccgaccccccaccgccaacacacacacaaaggctctggtgtttactaaaacttgtgtgcaagttgaacagttgacttacatgcttaaagaggtggttttctgctagagggcaaaaacatacttttaagtcgttaatttcacccacctactagatccataattgatatgttcccaatgctctgtgcttgtttacttttatcatttctcttcatggatgacctccattcaactggccaaagtccagttgaattgaaatgcactttgggtacccctgtaatttctgttgttggctgagctgaataatcaggaccttggcttacacagaataagtttgattcttgctttcctattcccatttgtgtttataaaagaagaacctaatgtgataataaaatagcagtcatcagagttgaactgttgaccagcaggcagcaccaggaggtaatagtttgaaaggaagtcagggaacataccagaggccacttcagcataggaaagacaatttagggctgtcagtgtgttgcttattaaagtgtcatttgtgtacaaaccaaatgtgggaaattgaaagttcttttgttcagcagtttctgatgctgttgctcttctatgtgaatgcagctgaaaagatctttgggtcctacatgcaggattgaacatgggctgccctatgggtttagtggctgtttatgtcttcattttttttcctcaaagacctctgtaatttttaacttcagcaaaattattggaatattactattatcacataacaaaaggtaacaatttcaagaaatttaaatacttgaaaggctattaggctggtatcagtcagaactagaattgatttctggttcaatcattttccacttagagagttgttactaattcctgtttgcctcagtttcctccatttataaaactgagatagtgcctacctacctaccttgcagggttgttagcattaaataaaagaacctataaattgtttagtatattgccgggcccaggcagagtaattatcaactgtcattgttaaaactctcagcgcttaatgaggtgtatggatattaatatcttcagctacagatggatatgagtttttaaaattgaataaggtatataacttgccagttaggaaattacaaaaataattttagtctaatatgctttttatttaagccttaaatatgcaaagattttatttgagaggcattatattagaaaaaatgtggttatataggttttacaactgaagttaattctggctgtcactgaatttggttaattaaaagtagacacaaaacaaaatcctgactcttgactaatctgcaaagcatatctactttgcagtaataacatgaagaacaggtatataggaaaatacacctggtccttcgtaggtgctccacaaatactcctttccttctctcagtttatttgcctaagcatgcaaatgaatcaagcatgcctaagtctctattctagctagaaaaaaaattgtttgcaacttatgcattagatggcatgatggagagaaattggccaaatactttaggacctgggattattagtgctagaaggaaaacttcttccacatgacctagtctaaatttcctccttttacagattaagggcattagaagttatgcttgagctaaaatcccacatgatataacattatatgttaaatttgtatatgtttttagattagacacagtttatatgcatcatttttgagacaaatgatgtgcaattgcctgcgggatactgcttctttggagaagagagtattcgagtttgctgttgaaagaggtgtttcattaatgttgagtgcagagctaaattaaactatcctaatgttttcacttttacatttaatgatgctgtgaatgattcaaataacatgatctcaaaagagtagcattttttttaatgtttaaatgaagtgaattacattgaagtaatctctctcaggtggaagatactaatgtcagaaggttcagacactcaccaccaaagggaatctcaggaaggacggagggtggttagcattggtaaagtaacagctgccataatggttgatgagctgaatgaaaagaatataaacgttaagcttcgccgactacaggtagaaggtgaaaatgaaccattttcctgaagtacagtcatgtgccacaatgatggtcccataaggctataatggagctgaaaaatacccattgccttgtgacatcttgatgatcctgaccccgtgtaggcctaggctaatgtgtttggttttgttttagtttttaacaaaaaaagtttaaaaataaattttaaatataaaacatagaataagatataaagaaaattattttgtacagctgtagtgtgtgtttaaactgtgttattacaaatgaatcaaaacattttaaacgattaaaaagtttacatcaaggtaaggttaatttattattgaagaaagaaaaattcttttataagcttagtgtagcctaagtgtacagtgtttataaagcctacagtagggtacagtaatgtcctaggccttcacattcactcactgactcacccagagcaacttccaatcctgcaaactccatgcatggtaagtgttctacacagctgcgccattttaaaaatctttttttacgctgtttttactgtaccttttctatgtttagatgtatttagatgcacaaataccattgtgttatagttgcctatggtattcagtacagtcacatgctatacaggtttgtagcctaggagcgaagcaataggctataccatatagcctaggtgtgtagtaggctaaaccatcaagatttgtgttgtttgcaccatgatgaaatcagcaagcaatgcatgactgtagtttgaaatcagcccgagataaggccttcagtcctcagccacagaaccctggactttgagagcagactgacatcctttcctatttttcttgtttttcttttcctttttttttaaaaaaaaaaaaaaaacagggtctcactctgccacccaggctggcgtgcaatggcatgataatggctcactg

SEQ ID NO: 818 - DNA, 7028 bp, Homo sapiens
gcgggcgggcatctctgccgaaaacacctacagcgcccgctccctcggtccttcgagcagtgatccctccgcggccaacctccccagggaaaccagcgattcgcggttcagatagcgaccttcgcccgcaggttcctgctctgccttcagacttcggcttcagtggcacctgctcagcgaggcctcgtctaaccaagccatccgaattaactacccactcactcgccatcacatcaccccgatttaattcgcagcggggcactgactttacactcgtgtgtcttctgtgtttatttatggtctgtttctggaatgtccgctcctgggactgggaccatgattttctggcgcagtgcgggtgtctcggcgtccgggatcgggcgggtcgcagtagggctccacatttgttgagtgactgaacaccgttcccggccggggagagcgccgcagccgggtccacttcaggtaggggctgggctttcccggccccgcctaggccccgcccccagcgcgaacccgctcccacctcgcctgtccacggagcagcagggggtttgactgtgcttttccctcttgcttccctcgctctttctgcagctgccacgaaaacccggaacggcggagcggcgccgcccctcgcggcacctccctggcagcccttggaggccgcgctgggcatgctcagtcagctgggccgcctcagctctcggagtaggaagctcgggcgctccggctgtaaggagccgcggcggggggaaaatggagcccttcaccaatgatcggcttcagctccccaggaatatgattgaaaacagcatgtttgaggaagaaccagatgtggtggatttagccaaagagccttgtttacatcctctagagcctgatgaggtggaatatgagccccggggttcccgactgctggtgcggggtcttggtgagcatgagatggaggaggatgaagaggattatgagtcatcagcaaagctgctgggcatgtccttcatgaatagaagctcaggccttcggaacagtgcaactggttacaggcagagcccagatggggcttgttcagtaccctctgcaaggaccatggtggtctgtgcttttgtcatcgtggttgctgtttctgtaatcatggtgatttacttactgcccagatgtacctttaccaaagaaggctgccataaaaaaaaccagtcaattggactaattcagccatttgcaacaaatgggaaattgtttccatgggcacagatcaggcttcccactgccgttgtgccactacgctatgaactcagcctacacccgaacctaacctcgatgacattcaggggttctgtgacaatttcagttcaggctcttcaggtcacatggaatatcattcttcatagcacaggtcataatatttcaagagtgacctttatgtcagcagtttcaagccaagaaaaacaagctgagatcctggaatatgcatatcatggacagatcgccattgttgcccccgaagcccttctagcagggcacaattatacgttgaagatagagtactcggcaaatatatctagttcttattatgggttttatggcttctcctacacagatgaaagtaatgagaaaaagtactttgcagcaactcagtttgaacccctggcagcaagatctgcttttccttgttttgatgaaccagcatttaaagccacttttatcatcaagatcataagggatgagcaatacaccgctttatcaaatatgcctaagaagtcatcagtcgttctagatgatggacttgttcaggatgagttttctgagagtgtgaagatgagcacttacttggttgctttcattgtgggagagatgaagaacctgagtcaggacgtaaatggaaccctggtttctatatatgctgtaccagaaaagattggtcaagttcattatgccttggaaacaactgtgaagcttcttgagttttttcaaaactactttgaaattcagtacccacttaagaaattggatttggtggctattcctgactttgaagcaggagcaatggaaaattggggtttgctcaccttccgagaggagacacttctgtatgacagtaacacttcttcaatggcggatagaaagctggtgactaaaatcattgctcatgagctggcccaccagtggtttggcaatctggtaacaatgaagtggtggaatgacctatggctaaatgaaggttttgccactttcatggagtatttctctttggaaaaaatattcaaagagctttctagttatgaagatttcttagatgctcgatttaaaaccatgaagaaagattccttaaattcatctcatccaatatcatcatctgttcagtcttcagaacaaattgaagaaatgtttgattctctttcctattttaagggatcttctctcttgttgatgttgaaaacttaccttagtgaagatgtgtttcaacatgctgttgtcctttacctgcataatcacagctatgcatctattcaaagtgatgatctgtgggatagttttaatgaggtcacaaaccaaacactagatgtaaagagaatgatgaaaacctggaccctgcagaaaggatttcctttagtgactgttcaaaagaaaggaaaggaactttttatacaacaagagagattctttttaaatatgaagcctgaaattcagccttcagatacaagctacctgtggcatattccactatcctatgtcactgaaggaagaaattattcaaaatatcaatcggtatcattactggataagaaatcaggtgtcatcaatcttacagaagaagtgctgtgggtcaaagtgaatataaacatgaatggttattatattgtacactatgcagatgatgattgggaagcactaatccatcagttgaaaataaatccttatgttctgagtgacaaagaccgagccaaccttatcaacaacatctttgaacttgcaggcctaggcaaggtacctctcaagagggcctttgatttgattaattatcttggaaatgagaaccatactgcacccatcaccgaagccctgtttcagacagacctcatctataacctccttgaaaaactgggatacatggatctggcctcaagactggtgactagggtatttaaattacttcaaaaccaaattcaacaacaaacttggactgatgagggcactccatctatgcgagagcttcggtcagccctgctagagtttgcttgcacccacaacctggggaactgctctactactgccatgaaactgtttgatgactggatggcatccaatggaactcaaagcctacctactgatgtcatgacaactgtgttcaaagttggagcaaaaactgacaaaggctggtcattccttttgggcaaatacatttctataggctctgaagcagagaagaacaaaatactagaagcacttgccagctcagaggatgtgcggaagctttactggttaatgaaaagtagcctgaatggagataacttccgaacacagaagctgtcttttatcattagaacagtgggtcgacattttcctggacacttactggcatgggattttgtcaaagagaactggaataagcttgtacagaagttccctctggggtcctataccatacaaaatattgttgctggatcaacttacctgttttcaacaaagacacatttatctgaggttcaggcattctttgaaaatcagtcagaggcaaccttccggcttcgttgtgtccaggaggctttggaagtcattcagttgaatatccagtggatggagaagaacctcaaaagtctcacatggtggctgtagcatgcacaaccgcacctcattttgttgcccattcagagagcttgtaagcttgggctctgccgcttttgcaaaagccaaggtaaagccaggatcgctgccaagttgtttgcactctttggagttctagttagctcagggcctgactgtatttttcatccatcttttctgaagtgtctttgggcagtatgtagttatttattacaaaattatattcacgtaaatgccaaccatctacaaaaacaatgagtaatttttctactttgaagatacacagatggggacaaaaaccctgttttggaattctgttctattcctcagtatccagaaagttactgacacagtaaaacaaggaaagttctaccctaagagccgccatcacttcaggccgctggtttgtcagccatctgttgcttcttattgatagatggcattggaatgtggtacaaagttagctctgaagaatatggtaacgaagacaataaagcatgcactgtaagaactgacctcaggtgtgcagatctactttgatttggggttttgattaattctttatttttctgaaaaaaagtttaaataatgtctgtaactattgtgtttttttcctgccgaatagccaggtgctacagatttttaaaatttttgttgtattgaaaagctaaacaaggccaaaaggttaaattttttgaatatttaagactttctttttcatcttttatagcgttaccataggaaactgttccaaactgagttagctttaattataattattttattcataaatggtgatagtccccagatctgtacacctttatcactccctgccgtagatatactttaggttagtatttctacattcgtggcaagcattttggtaacaccagtggttttcattgtgacttttatcactatcactaagaatgcaatttaagttgccttttggcatcatagatcatagaaactttctctctgaatcatacccatgtgtgaattttcattttatatgatagtgtagcatattagaagcatattttaaaacagagcctttgagaaattgaaaaacaattatttgaagttcaccatagtaccttaaaggaacaaagagaatgtgggataggagtaacttgaattcgtgtttagtatggtgggctttgaatttttttcactatcaaaaatagtgcttttgtttagttaaaaattgtagtttttctttttttgtgtgtccaaactaacataaaaggagtggtcaaagaaggaaagaagaaaaatgagggaggatgtccgaaactgtatggcattttactccttctgaaagagaaatactgtacttgaatttttgagctatgcagacttatacctagattgttgtgtttctttgattcttaggagaaaagctttcttcctaataattcttgagaactttatattttgtttgaaaacagtttctatgtacataaaaagggtatttacccatttgtgagcacttaaaacactccacagagtcagacagtgggaaaggtcaccctttttttattcggcaggtatcaagttagaatgtatggaattgtgaataaaattatattttattttatgaaaatatttttatataataaaatttaaaaggctggtaagctaaaaaaatagtcttctttaatcctagtgtgttttccccaatttagtcttttctaaaatttatctgttttagagtagaaaatattatatcctgagaatcacagaatcatctaaatatgtcttattcaactgaagtgattgtaagtctttattcttgtgctttggttaaatgaatgataatttagttgatagtgaaagttaatgtgtttttatatttttagagtgagggaaaaatactaaacttttgagagttttgttgtcgttgctggttttttaccatgtggtactaaattccactttgatacaaaatttaaattttgtaacttctcaaaatcacttaagattcttcagttttacctgtgcttcttgacatcgctcctataatgtatgttagttaactctgcatatggcaaatcttgtcttgaattatatcatttctctccctctctctctctctctctgtgtgtgtgtgtgtgtgtgtgtgtgtgtgtgtgtgtgtgtagtgtggggggtattgttatgagtaaaactttatcaaaacttggcctgaaaaagagataactcatgatccattgctatctttattactcaaaggctgttcattcccataataccagatccataatagttgtagtttttttgatgttgttgcccttaccttaattatttgtagttttagtaggccttgcctcagtttttcccacagaattccataattttaatgttgaactaacccatctatataggacttctaaaaactacgtcaggaatgtaaggttaaatgagaggtagaacttgtagtgtaataggtataatggtagctttcaaagttttatcttctcaaaacattgtcttagccagtgtatttctgagaactcagactgaagcacagaagtcacagtatgcttcttttatttaagcacacagattcatgacacaagtacttgttgaacaagtgttctcattgcagagagatctacttgaatataaaagggtcatcatactagattattaaaaaagaattggaaatcttgagttgtggaagaaatgtttatgctttggagatctaaaaaagttatgaatgtaggaattagataagtccagtttgttctgttaatataaaatggttagatatattaaactgcaagtagtatcagcttcaccataagcttgggccttcctccatcttgttttatttaagtctctttaaatgaaattttgttgtcattgtttcagcattcatgaactttcttactatcacaggttctactttaattttccttgccatatgtgtttccattttgtgggacattagccaccacaggaacacaagagttgtcagaagactcctgggtgtacagagcaaatcaagctgcatcagtattataggataccaaacagaatcctttctattaggaaataagaaatcagttaagtgttggctgggcgcggtggcttatgcctgtaatcccagcattttgggatgccaaggtgggcagaccatttgaggccaggagttctaaaccagtttggccaacatggcaaaaccccatctctactaa

SEQ ID NO: 819 - protein, 1017 aa, Homo sapiens
MEPFTNDRLQLPRNMIENSMFEEEPDVVDLAKEPCLHPLEPDEVEYEPRGSRLLVRGLGEHEMEEDEEDYESSAKLLGMSFMNRSSGLRNSATGYRQSPDGACSVPSARTMVVCAFVIVVAVSVIMVIYLLPRCTFTKEGCHKKNQSIGLIQPFATNGKLFPWAQIRLPTAVVPLRYELSLHPNLTSMTFRGSVTISVQALQVTWNIILHSTGHNISRVTFMSAVSSQEKQAEIYAYHGQIAIVAPEALLAGHNYTLKIEYSANISSSYYGFYGFSYTDESNEKKYFAATQFEPLAARSAFPCFDEPAFKATFIIKIIRDEQYTALSNMPKKSSVVLDDGLVQDEFSESVKMSTYLVAFIVGEMKNLSQDVNGTLVSIYAVPEKIGQVHYALETTVKLLEFFQNYFEIQYPLKKLDLVAIPDFEAGAMENWGLLTFREETLLYDSNTSSMADRKLVTKIIAHELAHQWFGNLVTMKWWNDLWLNEGFATFMEYFSLEKIFKELSSYEDFLDARFKTMKKDSLNSSHPISSSVQSSEQIEEMFDSLSYFKGSSLLLMLKTYLSEDVFQHAVVLYLHNHSYASIQSDDLWDSFNEVTNQTLDVKRMMKTWTLQKGFPLVTVQKKGKELFIQQERFFLNMKPEIQPSDTSYLWHIPLSYVTEGRNYSKYQSVSLLDKKSGVINLTEEVLWVKVNINMNGYYIVHYADDDWEALIHQLKINPYVLSDKDRANLINNIFELAGLGKVPLKRAFDLINYLGNENHTAPITEALFQTDLIYNLLEKLGYMDLASRLVTRVFKLLQNQIQQQTWTDEGTPSMRELRSALLEFACTHNLGNCSTTAMKLFDDWMNGTQSLPTDVMTTVFKVGAKTDKGWSFLLGKYISIGSEAEKNKIASSEDVRKLYWLMKSSLNGDNFRTQKLSFIIRTVGRHFPGHLLAWDFVKENWNKLVQKFPLGSYTIQNIVAGSTYLFSTKTHLSEVQAFFENQSEATFRLRCVQEALEVIQLNIQWMEKNLKSLTWWL

SEQ ID NO: 820 - DNA, 59846 bp, Mus musculus
  misc_feature (1)...(59846): n = A,T,C or G
agctacccagggtgccccaggctggtacaggaagaaaaggtggtcttggcctccgaagtccactataggggggggggcgggttgcagcttcagctctctgaccttggccccagacaagccagttaaggctcatgagggggaaggggaaactgaggcctggcaggggagcctttgactggctgtttccagacaggcactgagttaaagctaaaacagctcttgcctggccccacactctgctgtagcccctggagcctggaggatgcaatgcttatccatgtcgcttgcagggaccagtctcctcttaggtctctaaaccagggccagcaacacacgctgcaataaacccagcctgcagcaattccaggccagagtaaattgggttggaggaaggggctggtaaccacccttgtcgtccccatgggccccaggtgtgggcagatgatagagccagtggcacttctgggaactgcggggcctcctgttttgccggggagagggcctccttcctgccttctggatggccggctgacctcccgtcaaagcacttccattgcacctgggtgccgggctactggcctgctctgaccatgacttatttcctgcttctgggggctaaaaatagctctcctggatggccaggccctgttgggagttccacatgagacagacccgctatactgtgttctaatatagccactgcccacttacagacacaggaatcctcacagtatcccaggtcttggggtctctgccctctgatgtctccagacaatgggataatcccctaaccacgtgcagaagttcgtgttcagcagctagcaggcgtgtggcagcacccatgcaacaccatcctatagaccgggcaccagggaggcacgggaaggtgagggtccacagccaagcccagagtcaaacccatgaccaagtggtgcgggagccaccacacagagctgggcccagcttcaccctaaatgctttcgaggcctgaaggcctcaaagttggagaaaaataacaggaaccgatctgcagattgatccttccggaaggggggtgggggtgggggttgggtgtgggggaatgacagtgatgggtggagccagggagggtttgcacagatagagttgttctagggcaggaggtggcaggctggtgggactgcccagcagcagacatttggggaacattgcaggagaagtttcagggggacctggtgccttccagttctgctacgggcagcaggataggtggtgagggaggaagttggggatggaccctgatgtgggagatttgagcctcaggttaggacaccagagtttaagcttctgacctggcaatgctcacatctccccannnnnnnnnnnnnnnnnnnnnnnnnnnnnnnnnnnnnnnnnnnnnnnnnnnnnnnnnnnnnnnnnnnnnttaggtatgtaacacatgcctataatcccagcatccctgcctcagaaagaaagaaagagagagagagagagagggagggagggagggagggagggagggaggaaggaaggaaggaaggaaggaaggaaggaaggaaggaaggaaggaagaaagaaagaaagaaagaaagaaagaaagaaagaaagaaagaaagaaagagggagggaggaaggaagttaggaaggaatgaaggaaggaaggaagaaagaaagaaaaaagaaaaaaaaaactgttcaaggaagacagatccaggaagaacggtggctctaaacagccattgccaccaaggcatggagaccaggggttgccccttagactcctctagcctactgttgctgcctcggggatcccctgcctccacttctctgctcagtgcctcccacagctcctgcctctgctgcccctcaggtcccgccaccttcttctccccatgatggatgcaccggcagatgcagagcgccctccggtccagtgccttgcagattctgtacatgcccttcccaggctgagaccctgttcccgttcccacaggtcaaactgggtccctcctgctttctcccttctcacctacagccacgcccttccctctccctccctcacacagcccccaccctccagcctcccagaatattttatcttctgacttccaaatgtatccagtgagccccttgcgggaggagatttcttttgttcactgctatatctagacccctggctctcagcaggaactcagcaagtgcatgtagactctagatactagaggttgagggaatacagggtgggaccaggcagggactagcctgctctcttgcccatgccccgcaaacccctcatctgtcccaagaggtggaaaggggtgaatggcttccctgagtcctagaagagcagctccccccccccccccccgtgtgcagttggggaagtagagccttggagagacgctctgccttgattcccatgatggggacacacagctggagctgagcccagtgcctctggcctacacgactgtacctatcccatggccttcagtgggttgaggagggactgctacatcgccaagtcctaggctgtatggtacatggtccctgccttgaggattgaacaggaggtgggggcagtgcaggaggctgaggagagagtctaggctgcctccccgtgttaaccttccccggggtcccagcagctgaccagagaacacacatccatcttttatcccctgtgagcctgctgagagtctagcttagtcctggtgtgaggaacatgggtatgcctcgaaagaccttgttcttcaaatgcctcagggtggcatagtagcccaaggcaggcaaggcgcctgtgatgagcagtggaaggaaaggcccacccagcttaggggtctaagtgcaggggacccaaaggacaaggggaggtgatggggacagttcagagcaaaggggactaacaagcccttgggactgacattttgggaagagatggaaaagttttagggggaagtacaagcaaaaaataaaaataaataaacctctcctcctgagacagctagttgcagtcatacttttctcaaatgagaagggatggtgtcacccaaaagtccctaaaggccttccggagttcctttgcagaggtgacattcaagaaacatgcagggccactcaaagcccaaagctagaccattcaaggccagtggttggactgtataagatcagagactgtaccaattaaggtcagagcctggaccaaccaagttcagaggctagactaggtttgttggtcatgacctgtgtctcattggggacatgtcctgacctattatggagctgtatcctgttgtaaggttagcaatctttgggcagatgtttgaagagggtggaagaggtcctaaccttgctttaggacactagaaaaatctcagaagggtcatttagagaagaccctgagggatgtctaggagttcacaaggacttttcagaggatgtaacattttggctggttcttaaagaataaagttcaccaagaaagacagaaaatatcttctgggaactgggatctcctgaaggactcccataggccactagcgagagatcaaggcatggcctgggcccaggtctttcctctgcagtgtggggtaaagggaatacatggctcagctggtgtcctggctaggtgactactgccccagctggtgtgtgagctccccgagatcttggcatctggctgttaagtctgactgtgtgccttgctggggtcccctatgaagagtccctggtaagcacccccttattggcagcccttctcttggccgactcagcagctcctgaagatgtgcggacctgcaggttcccaatggttgagacaaagtggttgaagtttggagctggtaggggaggacccagtgacaaacagctgctcacctgcctgacctaagtcacagccatgatatggcagtgtccaccatatcccatccccgtgggaagattatggggtgctaatgggcttcaaaccgagtgtgtgacctcagggtttggagaagcctctagggcccttggcacgggggccttggatattcatgttcattaagaacaaggttcccctagccaggcagtggtggtgtatatgtttaatccaagcattcaggaggcagagacaggaggatttctgtgagttcaaagtcagcctagtctacagagtaagttcaaggacagccaggactatacaaagaaaccttgtcaagaaagaaagaaagaaagaaagaaagaaagaaagaaagaaagaaagaaagaaagaaagaaagaaagaaaggaggttctccatataccagctggataaccacacacacacacacacacacacacacacacacacaccccagcttgtccacccacaagtgggcatgtcacctttttttttaaagatttattttatttatatgagtacactgtagctgtcttcagacactccagagagagtatcagactccattaccgatggttgtgagccatcatgtggttgctgggacttgaactcaggacctttggaagaacagtcagtgctcttaaccgctgagccatctctccagcccataatgtcaccctctttgtgtgttcttgtaggtttagtcaaggtcaagtctttagcaccagacccaccccagagaagagctagagatgtgtctgtacttattgttttgtttagaaaccagtctcattctatagcccaggcctgcctcaaactcaaagcaatcatcggctccctccaaaatactgaggtcccagtatgcaccaccatgtctgacttgacttatcatttaggtttctgagacaaggtctcactatatagcccaggctggccaggaacttgaagtgatctgcttgcctcagtatccctatggccagcatgccacactatggggatcgaggacacaggacactgaggagttagaggagtggctctttaggcccagattccaaggtcagctgggcaggccgcccattgaggataataataatattctccccagttcagaggctaactgtgcaccctgtaacttactctgttcccacagcctggggatggggagactctaaatgcccatttcacgattgtgccaactggggccaagagaagtggggaattctgggttatacaggcaggaagcgtggggtgacggttccatggcctggtggggattcatccccactcccatgaccctggagaaggactcacagtatccatgagaggtcccagctccacctgggatagtcatgtggccccatgctggccacctcccctcagtgtccccttctgtaaacacacttcctacccttgcttggtgaggataaagttcccaccatgggaagcctacgtaagggctcccattggcccagctgcctgtcatcaactgctaagcctgcccttggggcgtggtcaccacagtgtctctggtgtccttgtagcagtcctagaacaggcacagtcagacagaccagcccctcacttgagcctcagtttacatagagactatgattgcctaggatccattaggcacacagtgggtgtttaacctgcaggcttgtggcttgtgtggtgcctgcctgtctaccagctgcccagcccagcctaggcagcagacacttggtagtggcctgcaaatgtgggtggggacccccggggcagccctgccctcatggctgccactggacagaggcctcagtgtaagcagaccgggaacctttcacaagcctagacccatgacggggtgtctgagaatgctgccattatccgattcatagaacacaaaggggccacgtgggggctcatataggcaaggcgcctgccatgagcccataagggctcagggtcttcaccctgccctgtaagtcccctgaccacagaggtcaaggacatgcccagagttagcagagggcactgacacacaggaatgagaactatttcctccagccccactggacaacaatgaaagagcaagcctctactggatccctaggggttggggcgcctaggtagcaggggagggaccctccagagaccaaggaagcaggggctgatacatgacaagcccctgtaggacatcagcagcaacagtgaggtatgcctccgaacagctttatccgtcggtcccttctgggaaccctaaggggtcacagtggcagtggcctgaggataaggaattgtactgcgtgacatcaggaggccacgggagccctcttgagccttggcatccatgaatggtaactgacatccaggccccagatgacatctggcacacatatctgctggggcctagaagctctcccgagggaccaggaggagtagggagatgaaccccagttccagaggtggcaggtgggcagaccccaggcttaccggaggccagcggctccaacatgtggccggcttcgttcctcacagcagtgctgtggtttggagtccatgcctctcttcagatttgaaactgaagctcctatccctgtggtcaccaggaggttacaggcaaggctgaggttggaacttaggggtgtgaactccagggtgaatggcagaggacacagtggctaagagctgagttgggacactgagcaggctgtgcagcttcaggcttatgtccccacctctctgacccttcccgtccccatgcaggctcatggtgaggaaggactggaagggcagagccccaggtggctacagggcccctcccctgtttttcctctactctgcctcctccagcactttcctgccctccacttgtgtgttaggagtacttcctgcagggggaaccttctccagtccccaggctgagcccctcttcccagacagcctgagcccccagtgttattgtttccaattgaagaagaaaaacatttcctcccctctgcctctcaccccctcccctcccctcctccctccctccctctgccctgcattgccagaggagatttgcaggaggctgtatgcaaggaagccctgacctgaggaacacactcaccctgagtccccagcagccagggaaagcttccacccccccccaaccccccgtcccgaccaattccagatctgcacacctggacagtggccatggccagagcctagggatcacttttcaaggccttcccacaggagttgaccagggacaacaccacatgccaagctggaaaccagctcccctagctggaagcaggcaggaacttaaacgacggttctgagtaaattctagaaggtgtaagcttgtggtgctgaccgagcttgaaaccctctttctattcggcagggacagtgacaaatgctagatgctagagagtcattaaagacgctttagccccagacagagacttcttgatggaatcaggaaccaggagcaggaggggaagggcccagtcatcagtcgctggcagccgaatggctggatgtgggtataactacctccgtcagtgtgctgggtgccatctacctgtctcccaatggatacccaattttatttatttatcctgggaggacccccagaatctcagcaaggacttccctccccactccctcctcacatctctgcccacccaggagtaaccttggtcttagagagaaaactgagttccagtcctattgctgatgcctcagtttctccgtctgtgaaatgggctcagtgacccctgttttgtcttctggtgcaaagaaggttgtgagatagtggtggcagaactgtgggtggtgtttacccccagataacccattaactactatgggattcaagacataaaacaggcaggagccatgatctattgcctcctcttgcccttcctcccgactttagcaggggctgtggggccatgactcaacctagcagtagtgtgctattatatggtccacaggaaacaggctcagagagggcaagcaccttgctggaggccacactatacttcctacttcagtttatgtgaatatattcagaccctagaattcaggtcccaaacgctgaaggtggggtgatggcagaaatctaccagcttagcaggaagtttgtccacaatacacaaaacaatccatctggccagctaaaccgagatgtcataaagcattatcctcgaggctcagtggggggagctgcaggatgcggcaagaaagcaagagagggacaggaaggaagcaaggagggggtggggagaggatggagaatgagaccagagatactgtgtgaagacagagggtagagagagggagagagacagagagggagggcagaggaagacaagcctataatctgtgctggggctgtccagtggagtggagggcctgtggctcacagggagagcatgactcgggccttccccaaacagaggtagaggcaagtcccctgggtgctcagttgggggtggaggcaggacataagtctccaatttcctgccaaggaacactcctgaccatcaaagccaaggccatgaatgggctggaacatggcaggcaagccggcaggcaggcacagggacaggaaggttggggtgggggccagggaaatggggatggctgggctctgagcccttgctgctgacccttcaggcacagggaaagcccctccccatccttccttcctatctggtgggagcaaggtcaccctctgagagagggccactaggcctcaagtgacagctgcaagctgctaggagaccctgactgagaacttgtagctggaactgtggcttcaaacaatgggtctgtgtcccaccttcccccttagcggtgtattttgggctttacttctggggcctcagtttccatgcacggaaagtgggttgagtctttgtaaggaggttagcatttggtgtggtcctatgtgggcactcccatgctatggagaggatcacctgggtttctatgaccttaggaaaatgactccttgcctttatcccagggcctacctgttcctttgaaggtcaaaggagtccggtgcccagtgccagctcatatgtggaatgactttaggtttctcagaaccttggcctaagggcaaggtcctgggggtctgcggggtttggctctatccagaaagtaaggccctgtgtctggtgttctgctcagcccagcctgcccttgcaagaggaatgaacttcctctcaacacagtttcctacttttgctgtgggattgtcaagtttgtccccggagcctgctgcttgcaaactccctttacagagcagttcggggaacagaccataggttagccaggggcctgatgtccctggtctggctggtctttagagtgaggcttggagaacatagggggtgtgagcgggggggggnnnnnnnnnnnnnnnnnnnnnnnnnnnnnnnnnnnnnnnnnnnnnnnnnnnnnnnnnnnnnnnnnnnnnnnnnnnnnnnnnnnnnnnnnnnnnnnnnnnnnnnnnnnnnnnnnnnnnnnnnnnnnnnnnnnnnnnnnnnnnnnnnnnnnnnnnnnnnnnnnnnnnnnnnnnnnnnnnnnnnnnnnnnnnnnnnnnnnnnnnnnnnnnnnnnnnnnnnnnnnnnnnnnnnnnnnnnnnnnnnnnnnnnnnnnnnnnnnnnnnnnnnnnnnnnnnnnnnnnnnnnnnnnnnnnnnnnnnnnnnnnnnnnnnnnnnnnnnnnnnnnnnnnnnnnnnnnnnnnnnnnnnnnnnnnnnnnnnnnnnnnnnnnnnnnnnnnnnnnnnnnnnnnnnnnnnnnnnnnnnnnnnnnnnnnnnnnnnnnnnnnnnnnnnnnnnnnnnnnnnnnnnnnnnnnnnnnnnnnnnnnnnnnnnnnnnnnnnnnnnnnnnnnnnnnnnnnnnnnnnnnnnnnnnnnnnnnnnnnnnnnnnnnnnnnnnnnnnnnnnnnnnnnnnnnnnnnnnnnnnnnnnnnnnnnnnnnnnnnnnnnnnnnnnnnnnnnnnnnnnnnnnnnnnnnnnnnnnnnnnnnnnnnnnnnnnnnnnnnnnnnnnnnnnnnncgccctcactcgcggggccctggtctgctgccgctgcctctgctgctgctgctcggggcggcacgggccggcgccctagagatccagcgccgtttcccctcgcccacgcccaccaacaacttcgccctggacggcacggcgggcaccgtgtacttggcggcagtgaaccgcctgtaccaactgtcgagtgccaacttgagcctggaagccgaggcgaccgtgggtcccgtgccggacagcccgctgtgtcacgccccgcagctcccgcaggcctcgtgcgagcacccgcggcgcctcacggacaactacaacaaaatcctgcagttggacccgggccagggtctggtggtcgcgtgcggctccatctaccagggtctgtgccagctgaggcgccggggcaacatctcagccctggccgtgagctttccgcctgccgcgccgaccgcagaaccggtcaccgtgttccccagcatgctcaacgtggccgccaaccaccccaacgcgtccactgtgggactggtgctgccgcctacctcgggcaccgggggcagccgtctgctcgtgggcgccacgtacaccggcttcggcagcgctttcttcccgcgcaaccgtagcctagaagaccaccgcttcgagaacacgcccgagatcgctatccgctccctggacgcgcgtggagacttggccaagctcttcaccttcgaccttaacccgtcggacgataacatcctgaagatcaagcagggcgccaaggagcagcacaagctgggcttcgtgcgtgccttcttgcacccggcggtgccaccgcacagcgcgcagccctacgcgtacctggcgctcaacagcgaggcgcgtgcgggcgacaaggacagccaggcgcgcagcctgctggcgcgcatctgcctgccccgcggcgcgggtggcgacgccaagaagctcaccgagtcctacatccaactgggcttgcagtgcgcgggcggcgcgggccgcggcgacctctacagccgcctcgtgtcggttttccccgcgcgcgagcagttcttcgctgtcttcgagaggccccagggcgccccaggtgcccgcaacgccccggccgcgctttgcgccttccgcttcgacgacgtgcaggctgccattcgtgcagcgcgcaccgcctgcttcgtggagccggcgcccgacgtggtggcggtgttggacagtgtggtgcagggcaccgggccggcctgcgagagcaagcgcaacatacaggtaagccatagacctgaggggcgtgtgcggggatacagtatgcacgcagatatcccagaggattggttactgccagcggtgctggcccgggagcgtactgggtcacaggtgcgcacacctaagtggggaggtctaggttgtcaaggtacccaggtgttccccgaagacagcgcacctacaaatcagctctgcaggtgggggccacaggtgtgtgctgaactgagagaggggagtgacaccaggagagtgtttagggagagtgcaggtgcccttaggacatacctctgcactctggcagatgtgtgatgggtgtggcacctggcactgaagataaagggcatgtgggtcggaagggctgagtatgtgacagggacacccatcggagatcccaagagtgtagacctgcagggatgtaaactcccagtgggagcccgtgccaggggacactgttatttgggaagtgattggttccctagtgaggccacctggttggcaaacaggtgtgtgctcaaggccacctcaacaaatagcaaatgagcagctagcaggtggtgtggcagacctgtgatcacaaatgctgtgggtttttaacttaagccagccattctcaacatgtgggttgtgtgtgacccctttggagccagacaaccctctcacaggggctgcattatcctgcatatcagatatttactttgtgattcataatggtagcaaaattacaattatgaagtagtaacaatgaattcattttatggttggggggtggtggtcttacccagccttagaaaggttgagaaccacagacctagtgtgtggtgtgtcaaatgtcttcagcaagtgtgttctcatccctttgtacatacagatgaagaaatgggtgtaagttttaagggatgcacaaacagctgaaaaggagcagaggtggggcttgcttgaacacaagttgtttggccccctcatgtgttcatggtgctggggctttgcggccttacagatgtggaatgggggcatccaggcagtctggccggacaaatggaagatggaaaaggagtgaatctttggtggagaactatagggctgagggtgaggcggggcctcagggtgggcagtagcaagagagccaggctaggggatccccaagtgaattggccttgggtacagccagtcccctctaagaatttcacaacagaactcattttctttcaaccccaaaatgacactgagtttacaaagggctaagcccagccttctgggctcactgaggctccctgccttgtccctctctctctgtggtcctcaggggtagcaagactataccgtgggcgtgcccaacactggggctttgagcaagcacagattccttctcttggcaaagactccctcagccgcctaccaccctgccgactgacccctcacaagaaaggtcatagcgggtgagaggcagaaggactgtctgaagtttgtggcgctgctacccagcagggtcaggccctgtgcagttctggggtgaggacagccactgttcttctctccggagccttgccatggctgtgccttggctgcatctgaaggctgagagagtaggaagagggaagctctgtgggcaagggaggcagcccttcgtgggcccctggctgatgaagggttctgtgggattcctcaggccgcttctcccctccccctccagttagatgtgtcctgattcccacggtccttggtgcccccctgggccggcacagtgactcacccagctgaaggcagctggattgtcgtcctccctatgggggcagggcctctacagggaaattagccccagggcagtgtagttaaggcctgcccctcaccccaaagccacacagtctctctgctagcgctcttctaggttcgtctgctgtgttctccccaatgcccagctgtggacacaggctagggccccctggcaggaggacctgcagcaggccacggtgcttgctgtcctttccaagctgctgctggctcccctacacgggcttgaagtccctctcttggtgcctggctaagtggccttgacggggcaacagaatcttctgaagttccctaaagctagggtaatgcacagtcgccttcccacagaggcattaggaccacaaacacagtcttcccacagaggaccaaatgagcaaggtaaccacaaaggcaaatgctcagtgcccagcgcacagcagtcattggttggttgagctgttctcacccctggggatgcagttagctcttagctgggctctaggctgtcctggaaacatgtcctcatcaggcctgctttgcagctataagacccccaccacttgcactcgcagcctcctgtgggtcccctgaacattttaccaaacccctaatgtcatgagacctctgctttccggggaccctcatgcgactccctggtttctggccttccggacaatacagagacctaaggatggactgggtctcatgtagcacgggtcagttttaggctcactgagtggtggggttaaggatatgtgccaccaaactcagtgtgtgtgtccttgagtattaaacccaggctctaggtgaatgctagagaagtgtggcaccaactgaactacatcctgtctcaaacagagtcctcttcggagcacctagggtcagggtgggcactgccacacactgtccactgccaagcacaggggctggcaattatgcgatctagaaagcccacggtggctggcaaggaggaggggcccataaggaacagcagtcaagatgctcagggtaagatatcctctgacgtctgccgtgcgttggctctgcacccctgtgctgtcaccacagggcaatgggctggacctatgtgcctccactgtggcgtgtccagcagcaggtggaaggaaaagaggtgggattaggtggggtttccttcctcacaccgcagcgtgttcagagggaaagtatgttggaccgttatatgctgttggtagagaaactgaggcagggaatgacaaggtagagctggctggatgcgattcctttctctgaatcttttgcctgtaaatgaccatgatgtgtgtgtgtgtgtgtgtgtgtgtgtgtgtgtgtgtgtgtacttaagttgcaggacagcacagcaaatgccaggtctgcttatttttttttcccatggtgtctttttatagtaatggcaggggaaaaaaaaaaacccaggcagtttttaaagcaggcgtacagtgggtggcacacagctcaggaaggtattttctacaccaatttcagggctgagatggcaggtggtggcggtggagggagagagcttccaagacaggctttaggtttgggaaaggatttgaagtcagcaccctgtgtcaaggaggcaaacagagacccttgtgggattgaggagagaggctggctgggatagcctcccctggaaagacagctgagggccacgctgacaatgtctggctcccgtgtacccagggacaaagttgacagagctctgccctgccctgcccatgtgctgtgtaatccagggccagtcagttaccctctctgtgcctcatgcgttctcattctaagtctgtgtttcctttcaaagatgtgggtcaaaaaaaaaaaatcccatatgctgcacccaggaaatggcaggtgcaggtaccagggagagaatcggcatctgagcccagcgtgctggtgtgtggagcagacagcaggtgctcagaagagggtgggctgggcccttacagctgatgagctcacaccaggctctgagggaggcaggatgaagcagagaactatggtgagagtgtgggcaggccctatccccacaggagctcagtggggcacgcagactgaaagctagccaggccagtgcctgctgtgcaccaactctgggaggttggggcaaccgaggaagctgaggcctctcagttgtttgtttgttcgtttgttttgtggggtgtgttgggcagccccagaacctgctgcctactgctggaggggtgcttgccactgtcttgttctgtctacccacactcggtcctcacacagtgaggcttacagtgggggaaactgagagaaacccagacagggcaagggacttgcccagggtcatacagctaccctgtgggttccaggtcaccagagtgcgggctgattgtggcctccctgtgaccagccttcactgaaggatggcttggccagctgagagctctgggctcggggtgtctaggttctcccatgactgtaatgaggtcatttgggcaattccctggtgggggctgggcaccacagctcctgagagatagatgggtggggtgaagccactgggcatgtgcagaagggccgggtgctcaagtctcctgggcacagaagaggcctgagagcatctggctgtacttccctctgaaaatgcagcctcttagccaggtgcgaccccagcacttaggaggccgaaacaggagggctgtcagttagacgccagcctgaactgtgtagggaaaccttgtcccacaccaaaaccaaaagtaaaggaacaagaacatcccttctctggaaaggggtgagggccccagctcctgggagtatggaaatgcagttatcagacagtaggagcgcacactaggcaggttccttttgttttttccagtggggtcctgagttacttgtgttgaggtcggagtggagagacttctcagggaagtgcagatggatttcatggcccaggacacaggcacagtagagaacgtttctatttggcaggctgggtagccttgttcatgaagtttagggggcaagtatggggttcaagttctggtggctgctgcgggatctggggatctgatctgagccagaccatgtcttgacagagtccctcattcagccacccaaactgcaaatgtccctttgtaattaatgaggtgccttgagagtttgtcctgtgccagacatttgcaaagcaccttagagcccagctctccttgcccaaaacagtaagatggcgtttatctacatctacattgatgcacacgcttggagaagccacagctcagtgtcccgagttggcctctgtcactcaaagacagggtttctcattgaaccaggggcttatttcctagactggctgacagtgagccccaagtattctcctgcctcagcctcccagtgctgagattataggttcaagcagccagacccagcttttcacgtggcgctgggatctgaacccagagccttgtacttgtgcactgagcactttaaaaaaaaatgaatccattttaaaggtgggaaaacggagcctaagaatggcctaagatggcaggcagtgagtgctcccagaattgttccagtctagcgtgagaacctttcagccactcccagatgtggggcttctgcccttcccctgggctgccatcttctgtggtttgtcatgtcctgcatcttaattcctaggggcatcccttagggaggggactaggcctgttgcatagcccaaagagagaaggtatagaccctgccccagtatcccagaatcccagaaaactcaggacctgtgctgagcctcatccaataggagggctccctggaggtggtggctctgggcagcacctggaggatggctagacagggaaggaaggaatcatggcagggacaaggtggtggctgacttagccagcagggctgagactgagaacatagagtcctgtctgtggaccaagttcttagataccatcctgccggtcctgaggagccagtgtggcctgagaggctgaggacgcatggctcatttggctctggaaaagtccgagctgctaccagttgctggctagtttcccctgtgatggctgcaccaggtgattcccaaggcctttccagctcctgacaatggtgtgagcattgccatggaaaccagctgtccctgagtggggacagccccaagagtgtctcggagtgccagaacaggaaccaagctaccccagaacatagcttcctcttgtcaaagtccatgttggggccacccaggtgggcatctggtggccccactgaagtagcttcctctggtgctgacacgtgatgtcaccaagctcccaggcagccaggcctttgctctcccaatgcactgtcctcagctccaaaccccataaatcacataagatggaggatggatggaggaaggaagcctgcggctctagtccaaggcctgtgcagccccagagggccgatcacagcagcactttaggctcaatcagtaaataacagaactgcaggtagtaaccttgagtggaagcctcgggctggagccatgctgggcgctggctagctgcccgaatgggtcatctcagccctgtttgcctgctgtgttatgatgcagcaggcctcagtttctccacctggcttttgagggcttgctagcaccaagtggctgtgatggtggcagccgttgggagccacagactgcagaaccagctgacctgcctggagcctcggaagccccaagtgtgtcagtacccaagggactggggactacagaaggccagagaggaggaaggctgcgctgtagaggaggtgtgagactcaggctgttcctagccctcaagggaccggtagtggccagctccggagacacagctggtcccctgcagtgaggaagaagcagaaagccatcttgctggaggaggcctgcctactggagctagctggggggcagggccttgggctggggagaaacacagtgctgcttatactacaccacactgtgttcctgggggacaagttgggggggggcggggaggatgctggggactgggccaggccagggaatgagaaacagcctggagaagggggagctgggtgcctggctggctgtggtcagctagccaaacaaccaccgtctgagtaagctctgcggggtccaggcagcagccgctcaggccaccaaacccggactgtgcaggatgctaagaaactcacgcagacacctggctgctgttggtacccagcggtcagctggcagggcttctccattcttgggcaccctgactctgccgatgcccccaaagccacctgggaacatttactgagcagctgtgagcttagcacctctagtagtcctgtgtggctggtgctgttaccgtcccagcctcacagataaggaagccagccaagggctgggctgtgttgtgtgtcttaaggaaggccctgcctgcctctgtgctaggcagctcctggaggtatcgtgatggccttgggaggtgcatgggctcctgggcaggaacagtttcctccgagagaaccttccagaactgaggctgtcatctcgtcccctggccagagctaatacatagtaggttttaaggaatctttgtgcctcggtttaccctcaagtgagacattgcgtccgtggagctgccatgtcccaaagggcagcctgtgctgaagctgggagtggggctttaaggctggatttcttagaggtgaagttctgcttctgatctcatatctgtgcaggctccagacaatttcttttattcctgagacaaatattaatgccaagggcagagagccccaagcggctgggctctgcaggaagctgctgcctgccgaggtcgccctttctcctgggcctgccacccccacgtcctcaggagaaccctgccccatccagcctggatccctgtccttatccttctgcagagatcagggcttgggagtctaggaggtgtgactccgcgtggggcagagatgagggaggagttgcccagaacacagatctcagaccagccacaggtcagggtcgctttgagcgagcccttgatggcttatgttcatactgacggaatgctgttgaactgcagagaggtcatggtctgctctgcagctgtgtgcgaatgtgttttaataagcatcatatttgaatgactttcaacttacaggactgtaagttatgaaggctggaagggtaatctttccctgtgtccctctccccaagtcctctttgctagcattccacactaccacaataccacacagtattgggccccctccgaccctcagctaagctgcagaggctcccagtgggatggggtgtggctctcacagagcccctgtctaacagagcagtagaggagaaaccctcccattggctgctgtcagggtcgttaagaggggagtctggacatctcagtcgcctctgtcatcccacagtcagctatgtgacacttctgagcagttgtgagccttccgttctgggcctcagacaggaaggtgtccctaggccagggacagctgcacagtagtaggcacctgggatggaacctggagactacggctgccgtgtctcatcctcctctgagtgcctgctgcggagctgtagaggtctggcagggtctgtgggaaggctatggcgggcatactgtaagccctcctggagctggcttcctgggagagaagagctgtattcagctgcaattactgaaggagtgaaatcaatagggcagccctttaatggagagtgggcagcactgagcttggccccaggaggcagctggctcaacagggaggggctgcatgctctcaaggaagagctgaaatcagtggccattacctactccatttcagagagggacaaactgaggctcttacaggaaacagagctagctgctagatttcgtgctgccccaaacacctgcctgccctgtgctacccacacaataggcaggccatgaacctcccttgctttgccggctcgccatggctgaattgcctttcatcactgcttagaaaggaagcggctggatgggatgtttacaccttagtcaaaattaatttcccttctttagtaagtattcactcatgagctctccagagggacctgtcatgcgcctaatacacccgaataaagagaagtgctggccgttacagtattgtctcacacacacacacacacacacacacacacacacacacacacacacacacagaatgagaatgtgtctgcacacacctatgggatggatgttcacatgcatgtggaggacagagaaccttgggtgtcgtcctcacgggctttccaaagtgggccaggctcgctggccagtgagctgcaaggatctgcctgccaccgccaccctacctcctgagttctgggagtccaagcctctgccaccaaacacaattgttttttgtttgctttaatcatggtttctggggattaatctcaggtccttatgccttcagagcaagctcttgtccaacagagccatcttctcctccctgggcttgtctttttaagagtctcatattgattgactagagccttgcaggctgggttacctggagaggaggcatggtggagctgggcctaagggcccagacactggctgctaagggcagggccagtagcgggctgtgggacatgggtgggatgtttcaagaactgcggagaaatggcgtggttggccttaagtgtgggtaatgggcagaatggaggggagccctgagcattcggtggggtgaaatcctcgcacacagcgaggacactgcagctgtatcatgtggacggtgtcatagggacggtggcgtgctctgtcccattgagctaggaataggctggggttgtgtgggccacttcagtgaatgaggtgctaggggagaaattccaggctgtggggcccatggccctgatcaccaagttctgcaaggccaccctcagggcctctgtgggtgtcccagccctactcctgcaggagccacttgtagtctgagggtttctggcccaggcaggcagcttccctccacatagatcattccagcccctgttgctcacttctcctttaaaaaaaaaaaaaaaagctttttttttttttttttttttttagattttatttttaggataagagaaagagagaaaaaaaaaggttgggggaaaggctttttcgaaaattccttcggcacagaattaatggcttgtgaacgtcagggcaggctgcgggagtcagttcccagcctttccacagcctcccctctcacggcggcccacaaatcactcccagcccagcaatggctctgcctttcccaggacccacactctggctggacagccaggcagggctcagcgaagcacccagagccgactctgggggtctctcggagctcatctcccaccacagggatttacaatattttaatttaaaaagcaacttatttaatgacaaaagtaagtaatctgtattcagcgaaagttatgtaagttgtgggagaccatggtctcagtgggacaggacagctgtagcccttgtgctgctccgggacagctggggaggagccccagcctgggggtcatctcagctcacgtaagtccaggacaaaggcaagtgggttggggctgaagctcgctcaggtcaggagtcagagtgcacagtgactctgtttgcagtctcacttactctcggtcagccaaggtctaagggtattaatggaaaattccagaaataaacaattcatgatcttgaaattgcttgctgtgctgagtaccacggagaagtcttgtgttgtccatccctaccctgcctctgagtctgggctctgtccagcgtttccaccctgcctaagctacccacctggtagctgcttagtagtcatggttcctgatagcctgtccccaaatgccagagcttggtttgcatggtccttacttttcttaaagtgcaaatgtacggtggtggcaatttgatacatctcggaaagccatgacgtgcctgccttgggagaaggggtggaaattcttgctgccgaggtctgtggtgcaagattgtgagccagagcccacacttactgtgctccattgcagtgttcctcgattgtcccactattgcctcccttacagagacgactgataaactctcattgggagagactatgggaccaaactgagtatataggatttggtccttgtgttttctgacattccccagaggccttgggatgtgttcctgtcaggcgctgctgtgcaggaacctgatagacagggacaggagcagagacagtggccctgaggcaggaccggcgtgtgaggcacagatacaggttagatggtggcatgaagacctgagagagctgagctgagggctggggtcagagaagccccattgtggtggccacaagcttcagagtaggcagcttctgtgtgcggggcaaatattctgccatcgaacttatcccagcatctcagactccacccatgtaggagcgtgtgtctgggggtcagaggacaactttcaggagtctggtctggagttctactttgaggaagtggctttcttgttgctcatgtgaagttgggatgagtctcctgtctctgtctaccatctctccataagagtcctggggttaagaggtgacacactcaggtcattaggcctgtgtgacaagcacccacccgtacccctgcaccatctcattagccacccccccccatcccattcacctttcttttttttttctttcaatttttggtttttatttttaatttttttatttaagttaatttcatacaaaatattttgatcctattcttttccctcccacattcctcccagatcctcccaatctctctacccacccgggtcttctctctcactagcttggaactcaccaaacatccatgatggttggctagtagttcccagggaaccacctgtctgcccctgcagcactgggatcccacgagtgcaacactgtatctggctttcaaactctgtgtcatcacgcttgtgtagcaaatactttacagactgagccattccacagccttcacatccattccgttattggattagcaccagtcatagctgacagccagtggtacctgcttaagtctgacccagcaccagctgaagaccttgacctctgcaaactcagtccaccactgatcttgtctcaactcccaaaggggaagtatgtgcacacgcccattttatagctgagtaaagtgaggctcagaaaagcaaagtaacatgccagggtcagccatagcaaccctcaaggacacaatttacccatgggttttagaccagggcacttcagccccaatccatagctgtgtgtgtgtggggggggggcggggcgggcgggctggcctactccaaaattgtcccaagaaacctagggaatgggaagagatgctagaactgtgggggaaacacagtggagatggaagggacgcctcttgggtgtcacttcagtagtgaactaaggcaaggatgacctcagtgaccagatatgggctcttctggcctctctgctgtgtgtggccaggaggaatgctgtggccaggtatgtggctgtgccgtaatgctcaggctgggctgaaattcccagggtcagggaagtctcctgcctcagcttccccagtgtctgggactgcaagtaatgtacccctgtacctttggtcacttaaaaggtccagtttaagaccagtcttgccagcttgtcttgcctccctccctcccttccccacccccagtctattccccacatatcttaaacaccagccatctcctacgagtagctgtgtcacccaaggtcaaggctagacctgggtagcatctggggatctatttaaccgggcctctgtttgtgtcaagcagggtctgagagctggggtctgcctgtgtgaacaagcagggagccagagaaggttccagagctgagtctaacctgcctgtcttcacagctgcagccggagcaactggattgcggagcggcccacctgcagcacccactgaccatcctgcagccgctgagggcatcgcccgtgttccgtgctccagggctcacggccgtggctgtggccagtgccaacaactacacggccgtctttctgggcaccgccacagggaggctcctcaaggtaagggtgctccacgggagctccctgggaagggccacagagggccagagtccccctgctttcttcagttttccctctgggcctccacagcggcctgtcaaggagggaggaactgacctgagcgatgtctgcacattgtctgctttcagcatctcctagcctggggcctgctgcctgccctgccgcatcttgacctttgcagtgcacaggctccccctgggcctctgtttctctactggctgcagttgttgggagacaacagagctgctggccaccccttcaggggtccactttctggattaaccatgaggccttgcaagttccagagctaagggagggcaaggagctgcttttcctacctgagagccgactggacacccctgctcgccgcctctccacctctctgtcagacttgcagccaggcccagcctaattgattcagagtccataatctaattccctttggcagctgcctgggtgggatggggttggggcttgggcctcacaggcctagaaccacctgtggtgaccagggagaaggcagggccccggttactcagccttgacccacccgggctcagctttggtggccagatgtgtagcttctgcttttaactgttactactcgctgtgtgacctaaggacatagcttatctcctctggactccgggctctccatccattgaggaggaatgagacagagcaggactgtggtcagagccctctcccgcttctacccacaaaactgcagtcattaggcacctgctgtttaccctgtgcctcagggtacttcacaggcaccgcgtcctttagctctaacgtcgagccaaggattctattccacagaaacaggccgctgaggtccttcaacaaagtgactagagatagctagagatggggtcgttgctttttcatttttaattgatttctatgtgccatgcttgggatgggatacagagcctcagctgggcccccaggactcagtgaacactgaggaagtggaaatgagttggctgtctgtttggtgtctagggtaggcgggcatggtgtgagccacggccaaggccctcccagcatcccaagaggcttcctggtaacatctcagaggcctagcccgagcctggggggacctggggagggcacagtgttgacctggcacactccagaataaaaagggtagagggctgtcgggaaggcgtgtggcaaaggtgaggcaggcctgactaggcaaggtgtatgatgtgtaacagtggaagcaaagtgggaatgaggagggggtgtggctaggggtgtggctaggaggtgtggctaggtggatcctcaagccatcaaatgccacagccagtttctttctgcagggaacctctgcaggttttagaaacccagagaaaggtgagtgggaggccccataggtgtccagactgcagtagcgtcttggagccttgagcacccagcctgtgaggatgaaaggggacacagacagcggggctttgccagtccctggagaaccatgcagaggggcctgggacctcgcccaggactctgcttgtcttatctcctgtatccccacagccccgtggaacgatggccatcctgactcttattcactggggaaactgaggctcagggagggaaaccaactcatttggattatagtgcatgtcagaaatagaattcaagccttgctattagccatgacaaccagcagcctcccagagaatggtttgggaactacagcccacacatacctgggggagatgttggagtctagcaggacgggagtccctgatgggggcgctgttgagtcagtgagaatggcgcatgcgcactccacttaggagccccccctttccctttcaccctggaacatctgagcaggaggggagaggagactccaaccctgggaaagcctgacctcgtgggtggcagtccccggcaccagtaggtgatggcctttccttccacagatcagcctgaacgagagcatgcaggtagtaagcaggcgagtgctgactgtagcctatggggagcctgtgcatcacgtcatgcagtttgaccccatggatcctggttacctatacctgatgacatcccaccaggtgaggaaccatagccagccagctttggtgccaggcctttgcgcatgctgaccctcctgtcggggacacctccttccccacctccatctttgcccacacgctgcttcaaagaggctatatttcccccacgtaccctctactaatacctccagagttagctaccctagcctcacgagggagaggtggctcccttgctcagctgggccccctctgcctacagatggcccgagtgaaggtggcagcgtgtgaggtacactccacctgcggggactgcgtgggtgcggccgatgcctactgtggttggtgcactctggagacccggtgaggcccctcagccgacggcagggcagggagggctgtaggggcggtggccgtggcctaggacctgaccccacggtgcctgcaggtgcacactccagcaggattgcaccaactccagccagccacatttctggaccagtgccagtgagggccccagccgctgccctgccatgacagtactgccctcggagattgatgtgcaccgggactacacagtgagtggagccacaccagcctaaagcccacgggcacaaccagcggcagccaggctttaggaagctcacagcaagggccaggcaccatctccggctgggccacctcttcaaggttctgccttggcctcttgcaagacctagtcaacagttaggaccatgcaacctgagtacatagcagtgcacagggccactgctggcgtttaaatggcagtttctgaatatgctgacttgggacacccagatagaaaattaacccttcttgtcttcttccgggagtgttagtggccatcacttatccctgatatgggacagacagggctggtggctagttcatgcctgcagcaaggtgggtggcccaacagctagggccctcccagcccctcctcactgactcctctaaggacagggccatcctatgtcaccccaaggggttccagtggtccaactggtctactccaccaggtcacatgtcagtcctgccctggcctcatccctgggcagcctgggataggcacagtcactcatccccttgtccattcacattgtactgagcacttactgggtgccgtgtgagtacatactctggggaccaacccttggcctgggaggagctgaagtgctcttgaagggagagaataggacaggtaaaatatagaggtgggattgcatgcagaatagagtcaggtggggcacaatggtaggcaagaaaacggtgcccaccagccttgctctgggagagggtgtggagtatgaggaagatagcttcatagcaaactacagtccaggggccctaaggtgggagtgaggtccacgtgtctggggttggagagtgggggcctagcaagcgtgtgctgcagaggccttctgttttgagataccatagcccagtccagccttgtacttgtagcaatcctcctgccccagcttcccaagtgctgggattgcaagctgtgtcgcaacgcctggttgacagagcctgtgtgacctctgagatgaggagcctcaagtggaaacactaaagccccagggtgtcgtccgagtagagagccttggcttccctcgagacaaaccgttgtgttttttgttttgttttgtttttttcggagagacactcaggcaggatcagacagatgctctgcgataggatctgtaaggggcacaacctgggcctcacctgagggcatctctcccccagggtatgatcttacagatctcaggaagcctgcccagcctcagcggcatggagatggcttgtgactatggaaatggcgttcgaacggtggcccgggtacctggccctgcctatgatcatcagattgcctactgcaatctcctgcccagggcccagtttccatcctttcctgctggccagggtgagtgcctggctgtgatgccagcccaagggtgggaccctgccagcatcacctgtggatgacgacatttgtatctctgattactttccagaccacgtgaccgttgagatgtctgtaagggtcaaaggacacaacattgtctcagccaatttcaccatctacgactgcagccgaattggacaagtctacccccatacagcgtaagtgggcagcgggagggggaacaggccccacacaacttggagaacagcttcagaccctggaacacacaacagacgggatgcagtacacacaacagacaggatcccatacctttcccttgcatgtagcaagctttgaccagccaggccctgcaaactgacaccagactggcagaggcagactaaaagagtctacctgtttctcccttgcatacctctcattagtggaaagctcactaccaagcaagatggcccatctgccccctttctccaaggcactagggtcatcctttctgagggaccccttgtcttccagctgtaccagctgcctgtccacacagtggccttgctcctggtgcatccagctgcattcatgtgtctccaaccagtctcagtgccaggactcgccaaaccccacggtaagtcttgtcttgggtctaccccacccacggctttagtacccacttctcttgattttaaagttaccatagtcctggcattgcactaacagcccggggtggggtggggcaggggactgactcatcactgcgtgttcagccagtccctgtggctgggcaagctggtggccttttttcctcccctgcccttgaatctctctgggtaactactccaggaaagctggttcttagaggcgacacttcagggctacagtgtgaccttctggaaagtccgagccaggctgaagctgtgcccttcatccacagcagatactaagggtggaacattgtcatcccctgtttacggtttctcagacacttcaatcttttgtccctatggctgtaagaggaggtggcttattcaagaccacctacctgggaggccttgaacccaaatccctctgcctttctttgaaatatagagttaggtactaagacccatggctctgttcccatggtatgtcaccttcaccctggaaggctcctccctctttcaggggtcacacgtgaaattcccagaccttagcaggggagtagcggtgcctcgagcttagacatacctccccttgctttatgtcagggctgtgcaccctgggaggggctgccacagcctcagccggaccctcaggccagccttcagcagcatgcagaaaccacacccagctcacagagtgcacacagaacagggcttctcactgacaggcccaggagtggcctatggtcatactgagagacgctctgggtgttgggatatggttagtctaggcccattatccctgtggctctggggttggggggcatcctagttatgacatgtccttacctacaaccctaagctgcatacacagcagggacttggtggctgctgaagaccagaagtatccattgcatctgcctggtacatgccaaccctgaaggaccaggggcccaccttacaatccaccagcgctcactgagtgctgcttgtatactgaagtctgtgctaagcactggggaaaagccaattagatgtagttctgtctttcctaccacaggctcaaagccttagctctgacctgtggctgtgtgatcccaggcaagctgctgaccctttctgtgtctttctccctctgtaaagtgaggcccacagcaagggctaaattagatatctggaattactccaggaggcaccagccctatacttggcacctagatgattttagaatctgtggctactgtgcatgggtgcccagcagagacatctcctaaaaggattttgtgtgggtcttgacacctgcataggagctcagcagctgggaggtgtgtctgatgctggcagtcggcttgttctccaggtctgcagctctccctcagggcaggagtgggccagccccagaggggctgtcggagagcattactgtaatctggcaggagaagaggcagcttcaccaaggcctgtgcaagggtctgaaccagtgctcgacttggcatttaattaagtgccagttagctgtggaggcgccaggcctcccaggcagacggcaggcaagagggtctgcatatcctccgggacccctggctcctggaaagggggccctgaaggttgtgcttgcagccacgtgcacgtggtcccagtggctcccacggggaggctgctagggttggctccggggttgggatgagaagaggcaggaaggtgccaggtgttccggggccagtgttgcctctcagagcctagtgctcccagggcaacatgatgtcaagctctggaagcaggatgggaagcggtagctggatcagagcctggtgtgttccaaaccacagggcggcacagtgctggagccagtggctgagtggcttgatgggtattgacagccatcacagactgcgggctggaccacagcaagtggcagcaggccaggaggccctggtcactgggtctattgatgcttgttggctggcttgggatgccagcgcttgccctcttgagcttggagacactgtaggagtctgggcactcctgcagctccatctttccaggagcacgtttgggatcctagccacctagcattgcgccctggcagttccagctaggcgaggagagatctgtgccaacctgtgtgaaccagagcaggctctgtgcacacctgcacgatggtagccgctgacctctccccgtctcctgtgcactcatccctgtcctacgtgtaaccatacacagcttcccgagcctgcaggtcaggtcggcaaatgggaaaagccgtctgatggcctgggtggaaacaggaaagggaaccctgtaagggaaaagcccagactggctctggccatggagttaatcagctaatgcctgtgaacagtcaccttcaggcaccgctggatccaggagctcaacggtggtgtaaggggtttctcaatagactcttcgctggtctagcttggtcagtgttccccttaaggggaatgtcccctgtgttattaggaaaggaactagtagtaacatgaaatatcccatgactacctatctgtaatgtcagcaccagggaggctgaagcaggaaatggcaaatttgaggtcagcttggcccctgtggcaagcacatagcgggaggaagctagagaggctgatgggagtggcagcccgcatgtgggaccctagtacttgaggccagcctgtctgagcaacatactgagacgctgtctccaaagggagagggcaaaagggaggacagaggaaaaccagtaccccaggagatgtgtccttgtcccagagggtgacctcatatacacacaggtgtcctagcactaattcttgccttgacagatgtgaccaagagacccctggctagagtagccttggggtatggggtccctgtgacgtctcgcccctgtaggtcagatatcgaggtggcaataggtagaacttcaaagccccagcactgatatttccccagtatcctgctgaggaatgtggagagaacatagccacaccctcaccttctctgcccctcccctgtacagtttcctctgtacagtgcggtatggtctctgagagcctcagaggcaatttttaacccaggtctggcctagtgttagtgtcctgcaaggttgaatcccaaagaacccagccacggaagcgcttacctctgcgcagtttctaggcactctgggtctaaggagcagatccaggaggaagactctgcctagatggaacatgttatctgtctccttatctagaaagtggggctgcaggcattgctatggagactgttggcaccctggggaggcacgactgtctggtgggggtggaggctctgaaacatcctatttgatccccatcctgtgtttggtttgcagagtcctcaggactgtccccagatcctgccctcgcccctagcgcccgtgcccacaggtggctcccaagacatcctggtgcccctgactaaagccaccttcttccatgtaagtagaggctgagcagggtctttgtgggtttcaggctatcccagcgcccataatggtggcccagcttttttctctgagccccattccagctgtgtaagacttggagcaggcaagcaaggctgatgggggacagcaggcagccagcagctgccaagggaaccctggcccaggccccagtactcctaccctggaggctccctgacatagtggctcagccccctgcctagtgccacagtccacgggtagatgaggtccacatgggctctgcccgccctgcccaggctgagcaagaccctgggtgctccaagctctgtggaacatactggcccagttcaaggctcccatgtctttcccagagatggccagaagaggccatgcccctaattctcatggtctagaggggacactgatggaggaagtgttctgggttaggggatgtggccatctctgccgcacccccaccccaggaggagtgtgtactgggggggggggttgatgagttttggaaggatgccagctctcctaattcctgggacgtgccatctgtcactgccactcgggagttgaggcccgtaacggttgtcacacgtgggggccacgtgccaggcatctgggatgtgtcagggagcctctatagggtaggggctcttgagagccaggttagagctgccttccaacaaaaagcctcccctgccaaggcctggtgggccacaggagcagggtggggaggccctagcccccaatttggccctggctgattctctccagctgtgtggcactcttggtgcattctctgcttttggcagacacaggaatcccgccctccttgctacctgatccctggtgctatccacccacttgcctcaccctgaccatgtttctaaatcaccggggggtcaggactggggcctggacactaggcagccctgctacaggctgttctgccatgtgctagggaggggacccacctgcagctccgcacactgggaacagaaccagcatttggcctgtcagcagcctctttcctgtgttagcttccggctaggaccccaggaaggagaggttgacctgcttttttttcctcagggtgttacatctgccaacagcaggggcataaacaggaagtaatggcgcacggctgctagggccttggtctgtctgacacatgagacccaagtttatcactcagtaaatatttatggatatgactcttgagggagcaagaggagactgaggagttaggcccagcttaacgtgttaacatttattgagcacttcctgcaagcacacattagacacctgtgcatggaagcctctaaaacctaggatgctttgcccagaagacctgtttatattcacatgcttgcatgaggccacacagtggacgagtaaaggtgggatttaaagctaggcctatgtgaggttgaacccaagcttcccaccaacttttactgctcttaggggtatagaaagggatggcaggcagctaggaccttcaccaatgggcgaagagaaaggtgcaaacagcctaagacagccaacaggacattttgctggacagggcaggctttgggagtagaacaggtcccacagctcatccctttgctgctggggcaggatggggtatgaggtatcctgatccaagggggccttggggtcccaggggctctgcagctgggtttggacactgtggtgagtctcactggtgctaaaaaggagaccggcccaggcagaggcctggtacgtgccatacagggatgcctagggtttacctctgcagggcagaggccaggaactcagcccaaggatcaggcaaagtctcctggagctggggcattaggaagtggtttaagtcactggtggggtctcagatgcctcttagatgacagccatcattccaaatacagagggtcctcacggcccaggcactggggagagtcaggactacccatagcacagttgtggacacaggatggcgcggtaagcctaaggagagacaactctagagtcagcatccatagggtcatagccagttcctacctatgctgccagtgtccccagtatctttacagtccctggcatgatggccaggaaggagattctggcagcaaaagcctggtggagtccctagcccccctgtcaatgtagaggctgcctctgtgttctgacacaggtatgggggatgggttctaagaaggctcctctgtcctgtgtctgcagggttcctccctcgagtgcagctttgggctggaagagagctttgaggctgtatgggcgaataactcactggtccgctgcaaccaagtggtggtaagtggtaaggcccagcagggcaggagaaacccattcggcctccttcctctcaccctgcctgcttctgccttttgcttctacccccgtcccccccccccccgcacccctgctctcatccatcttggtgacacccttgcccctgcaagagacaggccccacccacccttgcccttcctcattttgcagctgcacacaacccagaagagccaggtatttccactgagtctgaagctgaaggggccgccagaccgattcctagacagccctaaccccatgacaggtgagtgtcccgtctatcccacaggccaggaggtagggcccagccctggcagccacaagcaccatatcccataggtggccagcactcactgagacagccttacaccaatgaccgttgtaaccccccagaaccttacttccctctctgagccctcttgtccccgaattaagtgaggtcacaagcctttactgcaagattcgccaggactcagtgagccgatccctataaatcgtgtccataaaatgggggagtcagtaattcctccacacggggtccctccccatgagaaggactgttgatgaggctggggcctggacacagggcagcataggtaggagctggccatgaaccttatggctgccaaccccagagtcgtctcacctcaggctcaccgtgctgtcctttgtccacagttgtggtctacaactgtgctatgggcagccctgactgttcccagtgcctgggccgtgaggacctgggtcacctctgtgtttggaatgatggctgtcgtctaagagggcccctgcagccactccctggcacctgcccagcccctgaaatccgagcggtaagcacacaacacgccaggcacacacaacattcctggctcataggttacctcccgtggctaatgtcttagtggggcacagacactgggaggtggaagtagaggaagctaggctttgatccattgatatttcacagccacccaggaaacctctgaccgggtgacagttgaggatttcagcagctcagcagcctgatttggttagggggaaaaaaaatcttaggggaggattttgattggcttagcatgggtcaagtacccacccttagcccagtcagcttctggcttagatgctgaatcaggcatagccatcaggaaccccgtggcatcatcagccttgggacccatgcagcccagccacctgttgccccaggcctctgctaagcagagggtctgtgtggccccacctcctgtgggcacacatgacagtgagagagacacccaggcctcagaccttcccttgccttgccccccatcgcccctggcagattgagcctctgagtggccccttggacggtgggactttgctgaccatccgtggcaggaacttgggccgtcggctcagtgatgtggcacatggtgtgtggattggcagtgtggcctgtgaacccctggctgacagatacaccgtttcagaggagtgagtgtcaggcattgccaacctaatccttccccccagccctgtccctcacccaacagggcacactgctgtgcctgggcctttctattgtctctgcctgggccactcctttatcctgccagctctctgctgcctcctcagagaagccctcggggctctgcctcctgccacataagcagagctttgatgagaaccactttgctactagtaaagtttggaggggggaggggctggcggggtataaaggtcagggtgcaacagctgccccaacaggggatgtctgcaagaaggtaattagctgggcttcctgttggaaggctctgggccaggcttgcagataagggcatcaggtggacagccaggctagctgggcaagctgcctggtatcagagaccatctgagccttgtctcagagccactgatctggaggaaacagcagaagtggcgtgcctctcttggccaaacctacggtgaccatctacggagaacattgttggttcggcattatggccccagtgggaatgggaggcagaggccatgggcagatactatttggcactggttcaccttctgcccatttgcctgccccaccttcaggatcgtgtgtgccacagggcctgccgcaggggccttctcagacgtggtaacggtgaacgtctccaaagaaggcaggtctcgggaacagttctcctatgtggtaagtaggccaccacctctcaccacccagctcattccccacaagcctgcagccagagcccaatccctttccttctccccagctgcccacagtccactcactggagccttccatgggcccaaaggccgggggtacaaggatcaccattcacggcagtgacctcaacgtgggctctatgctccaggtcctggtgaatgacacggacccctgcacagatcttacgtaagctttccccacagcctgtcagctaagcatgccttgctctgtcccttcttggcttggggtggatctgggaaggaaggagctggacgtagcccaagccagcgcgtggcagtgggaaggagaaactgtttagaatgaggaaacacaaggctgagggacctgcagtgggtgaacaacagggaagggccacaccctgtcacctgttcatcaccccccccaaacaggcgcacagccaccagcatcacctgcactgtgccagggggtaccctgccctctccagtgcctgtgtgtgtgcgcttcgagagccggggctgcgtgcacggaaacctcaccttctggtacatgcagaacccagtcatcacagccatcagcccaggccgcagccctgtcaggtgagagccagagccacccctgcccaccctgcctccctgtccaggctgcagggagcctgacaggtcctgatattccctcagtggcggcaggaccatcactgtggctggcgaacgcttccacatggtgcagaatgtatcaatggctgtacaccacattggccgggagcccacggtaaggagacagggtaggtgtgggtgtgggtgtgtgtgggggggctttggaggtgagatggtcctatgcagccagggtcctgaagtctctgcctgtctactccacttgccttctccatctctctcttcgttacccactcccttcacttctccactcccgtggcctcatcgtaccctgcctgtccgtgcagttctgcaaggttctcaactccacactcatcacctgcccatctcctggagccctgagcaatgcttcggcgcctgtagacttcttcatcaatggccgggcatatgcagacgaggcagccgaggagctgctggaccctgcagaggcacagaggggcagccggttccgcctagactacctccccaacccacagttctccacagccaagagggagaagtggatcaaacatcacccaggagagccgctcaccctcgtcatccatgtgagcacccgactgggagcacgggtagtgggaggaggaggcagctgacctgggaaccccacccgcatcccaccatcccatctgcacgcacagaaggagcaagacagcctggggctggagagccatgagtaccacatcaagattggccaggtgtcctgcgacatccaaatcatctcagacagagtcatccactgctcagtcaatgagtcgctgggcacggctgaaggacagctgcccatcacagtgagtgggcagggctctgggggtgggcccggcttctgggtacagaaatcgctgagtcatcattcaataacgctggtcaggaaagtagagcttcatatccttgacagatggagaaactgatgcccaagtcattggttagtgccagctgctattacacaattggctcccatgtgttttggtgtcccacctacagtgaggcctgctagtcattgtgtagaatgatggagtagagcagaggcagcccagagggcagggcccccactgagttacccctcacctgctctaggacagcatctctgaagcccctccaaggcggtcattaccacatacaggtcattacctgtactgagttggcctctgcaccaaactctggatcacagtctgtctggcactgcctggttgaccaggagtccctgtggtcgactgttgtctgtgaggctcagagcacacaacagtaagaagagctgagacattgctctagcaaagcatgatgtgctgccccctaacccccactgtgcgcagatccaggtggggaacttcaaccagaccatcgccacactgcaactggggggcagcgagacggccattgtggtgtccatcgtcatctgcagtgtcctgttgctgctgtctgtggttggtaggtagcctgcgctagggagagtcgggaggccatacctgaatccctctgagagtggcagtgggtaaggggtggacatggttaggcaccctggggtgggacaggtagaaggtggcagatattggtaggatcctctgtgctcgggccattggctttggatgtgaggcagacgaatttgggagctactaaagaagtttgtccaggggaaatgatcctgtgtgtctaatatactcaatgtggcataaagatcagagccccccctacagtgctgggggggggggcaaaggtacacttgcctccggaaatggcctgtcatttcctaaaagcccttaggttaggtatagatggctcagtaaatctacacctgggtatctacccaagagaaagaaaacacgtccacataaaatttttttcacagaggtttgtagcaatattacctacattaaccaagaggtcacaatagcccaatggccatcaaatgataagtgggtaatttgggtatggtatagccatacaatgatgttttcagccacagaaaatagtgaatttccaaaagatcccacaatctagatgggctttgaaaacatggaatatgaaagagatagacacaaaaaagatgcccaactgtttttatttgaagtttacagaataggcaaagccatagagacaaacccattagtggtcgtctgggtgagggagggaatgggaacaactgcctactgggtaaggctctcccttggaccataagaacagtctaaagttctgtgctgctggtcacatggtgtgtgagtgaactcagacacctggcctgtaaatggatgggctctacagtgtgtgcatttgggggccagaggtgtcactcctcagtgtctgtcacctgttttttgagacaggatcttgcactgggacctggagctcaccgattttatctaggcttgccggccagcaagctccaggcagctacctttctgtcttgccagcactcacattacaggctcgtgccaccatgccctgcttcttatgagtcctggggacctccaggtcctcacatgtgcaggagtgctcccttgctcccatgtcttgttttaacttaaattactatgttcaatataaaaaagctatgagagagaaaataggaggaagaggaacaccctggatgtttgttcctaaaaatactactacatagatatcatatatatgtatgtatatatgtgtatatgtgtatatatatggtgtatattatagaatacacacacacatatgtgtgtatatgtatatacatacatacatgtacacacacatatcaatggatgctacatccctgccaagaaaggcaggtactatatactgcctttgaaaagtttaactcacaaactacatcagggcagaagaagcaagttacccataatttgtctacccagagaaagcccccaatgagtgctgcttgacacatttctctttctaagagacatcagggttgtcctgctagctggtgttgtcagggagggacagacggcagaaaggctaaggacacctgctcccctcctacccagaggcactgaggccagtgagtagagcctgtccctccaggcctgtaacctgcacacagcaggtgttcactgatgccttctcatgggtcctggggacctgagccgcccctctgctgcccacagctctgttcgtcttctgcaccaagagccgccgtgccgagcgctactggcagaagaccctgctgcagatggaagagatggagtctcagatccgagaggagatccgtaaaggtaagtgccagggtcgggtggcgctgcccacagctgggcaggatcactcacagtcactggtctgtcccacaggctttgcggagctgcagacagacatgacggatctcaccaaggagctgaaccgcagccagggcatccccttcttggagtacaagcacttcgtgactcgaaccttcttccccaaggtacacaccctccctcccgcatttgctggtcaccacagggagtttgggtcaaagcaccttttgggagcctgtctgtccacacccatcctggttccctcccccactttccttctctgctgatttgatgttcagctttctgtatggagaaccgctgtcctggctccatgttgacctgcctctcccctcactgacggagctgagcagaggggcaaggactctcccaggtccctgccagacgtcctggtctccacattgctttttcctcttggtggcaggatcagtgggatgactgtcccccttgtgcagtagcccaaggaaacacaggctctaccatttaaagagccccgcccctgcttttctcaacctcagaacacagcagcttgcctgcctccatctcccctgccacacattcagtggcccttgttcacccttcaggtcccttgctaggctacaccatagtctatgcccctctagggccctgccacactcctccacgtgtggcgactctaggtatcaagcaatctgtggtgctaaagcagtggtttctctccgcagtgctcttccctctatgaagagcggtatgtgctgccctcgaagaccctcaactcccagggtggctccccgccacaggaaacccacccactgctgggagagtggaacgtgagtatcccggccccaagggcctccacgcaccctgtgatctgaatcattagaaggtagttaccttcccttctaggaggcattcactcagccgttcagggtgctgttgttccctccccaccccacccccccgacctggcagagagcacggacacatgatcacatgatgtcatgccaccgctggttagatagaaactggcacagagtggatatggggctccctgccactgtccttgtggccttttgtcaccttgctgctcctctgactcttcagtaggagaggttaaggggggacactttgtggcaggtagtgaacgtcctattccaggaggcagctacacagccagcatgggtactggggcctcctgggacacaaaccatagggcgtttccttccactcccacagatccctgaacactgtcggcccagcatggaggaggggatcagcctgttctcctcactgctcaacaacaagcacttcctcatcgtcttcgtccatgctctggagcagcagaaggacttcgcagtgcgtgacaggtcaggctgagactctggaccccacccccctccccaggcattcctcattggccacaccggctcccagcggaggcagagtcctctggccgtctgtaggaggcgctgtgcactctggtccagggggatgctcagctttgctgacactgtgcgtgcaggtgcagcctggcgtccctgctgaccatcgcgctgcacggcaagctggagtactatacgagcatcatgaaggagctgctcgtggacctcatcgacgcctcggcggccaagaaccccaagctcatgttgcggcgcacggagtctgtggtggagaagatgcttaccaactggatgtccatctgcatgtacggctgcctgagggtgagtcccctctctgcccagaagcccccacctccgccgccccccccccaccgccaactggaaaacctagggagggggtcacatcttgacagtggggaaaactgaagcttggagatctggctagctggctccagaggcacacagcatctccagggcaagttggaggctgagtcttgtcctgtagccttagtcctaagcttggggggtccgaggcgggggagatgcaagcagagggtctttggactttggaggagggtcaggtccctcaatcctgagctttcctctccttaggggaggggcacagaagcaaaacctcaacagaacagaggttggcccagcctggctgattgttggttggaaaaagacaagaggtttcctggagcaggtgactcatcctgcaccccaggggagccgtggaaaaaagacagggctttggggccaacaaggcagtccagatgtaggctacattgtggacaaagatcaggactaggagacatcacagagttttcagcagccagggcctctctctctgaagttaggccagtcaggccatcatgaagcacaattcaagggcctgctcaatggtggcagagggcccagcactcacctcggaatcctgagataggacccagaaccagagccttaactgttctgggtttgtgtactagtctttgtggcaacctggctgtgtagttctgggcgagttattaccctctctggtccttagcttcattttgtcaaatgagggtcagtcagagagtagaaaagaaatggagatcgtaggagagaagccgcactttgagctctcagggaccaccatagactctggacctaggtttctcagccactgtgggtgacctcagcctggcctttcccctgccagacattggggtgctggggactccaggccagaccactacagcaggaagctgggcgggcagctgccctgacgctgctgccaaagcagcctgatgttattacaaacttaatttttcctccagcccaattcaccacgggtcgttccgttcccccacccacagaacagctgggcactagtctagggggacgaggagggctagcttggggctgcagtaatggcagtggccagggcaggaggtggggtgggaagcctgattgggccaacactcgccagaggcatccatatggggttccctgggggctcctcagccccatttccactcagctacaccctggaaggctccaacatctcaggcataggagttcgtaggtcaagtcccatgttacctgttcttgctatgcattgctgtgcagggtgcctgccctctctgagcttcagcaacaagggctggtctctgggtatgtggctgggatgtagtggagacaccctggagtgggtgtcagcatcagtagaagggagtgtgggggataccagcaggccagagcttggaagctggaacacagagggggtcctgacccctgacccctgaccctcacaggagacagtaggtgagccgttcttcctgctgttgtgtgccatcaagcagcagatcaacaaaggctccatcgacgccatcacaggcaaagcccgctacacactcaacgaggagtggctgctgagggagaacattgaggccaagccccgggtgagccgggggcagggcccggggcccgaagcaggagggcattcttagctgggctatcctgagcctccccagccaggtcaccaggccttatcatgacagtagccatcggctgacacccccctctcttgcgcagaacttgaacgtgtccttccagggctgtgggatggactccctcagcgtgcgggccatggacaccgacacgctgacgcaggtgaaggagaagatcctggaagccttctgcaagaacgtcccctactcacagtggccgcgggcggaggacgtggaccttggtgggcaagggcgggcaccatgcctcgcagctggctgctgcagcctctttcctgtgttagtcaaggccccagggctccccttgaggaacaaacccttgttctgcagctgtgggcaacagcaaaaagcaatcgagaaacgctttccaaagaggtctttcgggttgggttttgaaggatgcgtaggagtcgtggtcagaccggttaccagaaactgttcctaaagttcaccctgaactaggccctgccctgtactctggacagttagggtgaacagccgggctcccagggagcgtcgcttgcttctgattctaggagaatgggaagtttcttttactgtggtccaggctagtggctgcccctggggccacctcttctgtagtcctgatgcccctcttcacctccagaatggtttgcctcgagtacccagagctacgtcctccgggacctggatgacacatcagtggtggaggacggccgtaagaaactgaacacactggcccactacaaggtgcctaagctggcccagccaccctacccctcccctctaacctcatacgtctaacctcatctcctctcctctgtcagatacctgagggcgcctccctagccatgagcctcacagacaagaaggacagtaccctgggcagaggtatggctcatagctggggaggtgacccaagcgtgatgtgagggctcccttcttgggccctttcagagccgtgctgggtggggggcaactgagtgttggaaagggggtccccacctccatgctgctagagaaaagctgattgcttccagcagctacagcaaggccccaggagggcacgtgcccttccaagaggcctgggccgtggccaggtctgagctggttacatgacctgtgggctctaggccacacccctgcctccaaatctagaccatgtccttacaggccctaggcccagatccatgagggtcccagggtccatcctgaagtagaacgccagatcttggctctcccccagtcttcccctctcgccatccccctcgggttaccttcccaacccccctcatttgtttatcctgtgtttcccttttgcagtgaaagacttggacacagaaaagtatttccatttggtgagtgcccagcctcaggccctggggagcaggctttgctgggcggggctttggctctctgactccctgagcctccaggaaagagctcctaggccctgggaaaagccagagtgggtgagggagcagggatgggccgggtgctgggtaacacagggcagacttccgtgggaggattgaggagggtgccgttggggaccaaccctgcccaccttgcaggtgctacctacggatgagctggtagagcctaagaaatctcaccggcagagccaccgcaagaaagtattgccagagatctacctgacccgcctgctgtccaccaaggtgggcccagcctccatgtccaccccgtaggggaataaaggggtccccgtgctccaagaagaagtccgtgttcttcctgccacccagtaggcagcagaggacccagggttacttccgtggcctcaagtcacaagactcagacctacacccagaggccacattctgagccctacctccctgctacccaggtcctcctctcccccgctccaagaaagcatcattgacaactcagtcaggaatcttgaggctcagagatgttcagaggctgggctaatgatgtcccacatcttccctgcagggcacgctgcagaagttcctagatgacctgttcaaggctatcctgagcatccgagaggacaagcccccgctggctgtcaagtatttctttgacttcctagaggaacaggcggagaagagaggcatctccgaccctgacaccctgcatatctggaagaccaacaggtggtggccgaggaatggggttgcacgggggtgagggggggggcgccaatggggttagagcaccaatggtatcatggcatcagggcagccaaagcaccagggcagatgagggcagagcctggcctgaatgcttcctgtcttgaatcagcttctatttggccatttccccactgtgtggtctccggtgagagacttagctctggtgctgcagtgtcccctctgtgaaaccagaaagcatcatataagcttgcctttgctcaccgctaatgccccatcatacagagagaagcgaaggcccacagagcagcagtcacccaggcccaagggcacacactgggaagtggcagtgcacattggctgtgactcccacacctaatatgtagcttcctttgaggccccttcttcgctttctggggtcatatactaccccgccaagaaggtcccagaactcttagcctggccctcagagaaatgcctgtgcaaattcagttgcagtttctctctgctcggggtggggctgggcaggcaggcaccccaggctctgcagggctgagcaggggcttgtccccaaccctctctggcctcccaaggacagtcagccctgccttcttcgtgcaaggccgggtgggggaggagtgtggatacaggcagcagggtgggggcttctaatgagaaccaggagtctcgtgtgcgtgcaaaggagaggaaggctctctggggtgagggttggcccctagctggcaggggaaggacaccacatatccagaggcttcaggggctgcgaggaccagcattgtctacctccccagccctccactgagctcctgcatccccactgtccctgcccccacagccttcccctgcgcttctgggtgaacatcttaaaaaatccccagtttgtcttcgacatagagaagacggaccacatcgacgcctgcctgtctgtcatcgcacaggccttcatcgatgcctgctccatctctgacctgcagctgggcaaggttaactagtctggctgctcctgaagggggggtggggggcgggtgcctgaactctaccggagtcattcaagacaggcagagagcagatggccagccagagcgagctccacaggcacggcacctgccaagggcagaggatatgccggttcagtggctagaagccataaaggccttctgagaagagaggtgacctaggtagcccagaactctgaggccatgagtgcccatgggatcacagagctaggctggcttgggggaggggggtgagggcagggctcaggagtctcagcccacaagggaaatgaaatgtcaccacttcacacatgcattcccgtgacaacagagagctgccagcatacgtcttagcacatggtgcctttgaggtgttggaagtgcagggtgggaaccattcccgcagtcaggaaccagcttccaaccatctcagccaccaaatactatcaccctaataagggagtaaacaagacaggctgcgggctgcgtgcagcggagtactgctggcacacagcctaggagctcttcccttcaaatgaaagtccccatgtggtcaccaccctgaaagcctgacagcatcgtggggcagggcctccatgcaagagggaaagagggagggagggagggagggccagaagagaccaactgaccctggtccaaagtctgactgaatgggggttgtttagccatgtctgaggagccaccaaggccctctaggtggcagtggggacaagtcccatctttcagccacccaaactgcccgggtctccctgcccaggactcacccaccaacaagcttctgtacgcgaaggagatccctgagtaccggaagaccgtacagcgctattataaacagatccaagacatgacgccgctcagcgagcaggaaatgaacgcacacctggccgaggagtctcgggtaggtggcctttgggatctaggccaggagatagtaacgatatccttggctttgaggagtggacaaaaccagcaccattaggatgcagcagggggacagtaggaatttgggggtagtctctgtttcccatctttcctggcatcttcattgcaatgtattttctaaagtccaaggatgaggtggagtgttctgaagatatgagaggttagaatcctggttccagaaagccagtgtgtgcccagctcgcagggtctaaatgtattctatcagcaggctgtgggagtgaacaggctgggtcctcatctgtagggttaaacctctccttttgctagttggtagtggcacacacctttaatcccagcacttgggaggtagaggcgggtggatttctgagtccggggccagcctagtctacagagcaagtttcaggacagccagggggctatgcagagaaaccctgcctcaagcaaacaagtaaaaatacctcccctttcttcttgtgccacctttatagaaataccagaatgagttcaacacaaacgtggccatggctgagatttataaatatgctaagaggtatcgaccacaggtgagttccccctcccaagatttgcccattttagcccataacaacgctttagatttgtcgggggtgttggcactttgatgaggtctctggcgggtggcctcccaggctctcaggcacggcacatctgactcactgcaactcccctcagatcatggctgccctggaggccaaccccacagcccgcaggacccagctacagcacaagtttgaacaggtggtggctctgatggaaaacaatatctatgagtgttacagcgaggcctgatgcagaagagtgaccaggagcttcggccagggagacggcgtgcaggccacttggcctccacttggtttcttccccacatctctcacttgggctgggaactgacagaggagcctgctgggctaggagtgggggacactggcctcttagtgcccggctgccgagctcttggccttgtcccctggggcatctctgtcccctccacctgcccaagacccaactctaggatgaaggccttgaatatcgatcgctgccagtccctaataagactttccctgccaaccaggacagcctggaccatgcctgcctgttcactgtttcaggctgctcagcacacattgggagaggtggccatatcccagaacactacctcatccacctggcagagggaatttctgcttcagccaccaagcagttgtctgtgtccctcatccagagggggccttggccaccaacagttccaaaccaggtcagctgttagccgtctcattggccagtggcagcatgggcagtgcccattgcccacagaacggtggagagagggggacaggctgggggttcctggccccaggaaagggaggaaggcgaggatgcagggctgtagctggactactcagtcttcctggaagtgtttctaaagagcaccacttttttttgttttttgttttttaagaaaaaaaaaacttttatatattaaaacaaaaacttatgcaccaactgtgaatagctgccgcttgtgcagatccccaggggctcccggtgacacactggaaatgactgttccaggggacagaaaatactcatctgtccccagcacagcccccaccccaccccccatagctgctgagactggctcacagcccaagggggctgggctggaggggaaggctgggactctctggaacattctttataataaaagcctgccgggaaaacctactatgggctttagcctttgtcctgagatggccgaggaggggagatggggctgtttcttcgtcctgtctgtgcagagcctgacctgacaccctgcctcggacacggcctaagggaagacctctcccttaggcctgccaggagtttgcggctgcaccctgtggacacacatctccatggacagttctgacccctaggaggatatcgccagtgggtgcccctcacatttgtgctgtgcagagcatggaacccagagccctgtgctgtcttaagtgtacactctccagtgagccacatccagcccccacacccttgtctttattcaaacctaagagaagcagacatcttgttcctcattttgcagacagtgtcaaggggcctaaaggggctcaagaggtcacagccaagaagggcaagatggggaccagacatctggatccccttctctcagcccaagttcctccaggagagtctccacctccaaagtggaaggggttccaaactgaccagagtcacacccccaaatcttccatctactcttaggacatacgcctcatgtttcagacaaggaaactcagtttctctccgaggccagccgtggcctgcacctgaccacagcacatctgacctggggtgacacccactgtcccgactggggccccagtttctcaaggctgagtcagtgaggttctccccagaagcaggatgtggcagagccagcctgaatgatggccattcacatgtgtcccctcaagaaggaaagtccccatcgtactggccaaaagcaagccaggaccaaaattcccaacaacaaagtccaagacccagcctagaattcaccagctaaaaaaaaaaaagtgaacaacctctctaaaaatagctttctcctgtgcgggccgcgggcggagaaaccatctttatctctcagatctctgttgctgaggcttattaaggagcagatttgctaatttcaattattggcagatttgatggtttgaatttttttcctcgatgaggtgtgactccagaatggattcacaaaaccctgaaaactacaactgcagaaatagcccgagagaataaaagcctcgcatgcttgtggggacactcgcacacggcaccggccacacacaaggccagggcacctttgctgtagtggatccaggagtgaagatgaatcagtccacactctgttctaaaacctgacttttcccttgcacaacaatatgtcaggaacatctttctaagtcattaagtattccacagtctggctacacgtctcattaacatacagcgcctgacattcagaaggaggtctatgcgtagatctagtttccagggtcactagcattgccaggtaggcaacccccatgaactgcagtccttgtgtggggccccaaagacatgcctggcagccatgggtaccctggcaaggacctggctggagcatcctcaagctaagattgcaaagtgggagaaaccaacgcagctgttctcccaagtctctaagacggtgcaaggtctatccccaccctgtcacggggcagggctgatgggtccctagctcctggaggcaagaggctacaggctcttccccagcctcaccatgcaggaacagaggcaaaaatcggagcctctgcttgagaaatgccagcctgccatctgttgggtgcccctcggggcctgctgacaagcacattatagataccccagggagccagaagaactagacatggcttcctatgggactccagagagaagccatggacagcatcgaagcctgagccccatactgggcacttggtttccctagtgctgtctgttcccttcccaagtgtcccgtctcccctattgagaatgcccctcagatacacccattcctttgaactacactcttggccttggcagagtacgcaccacaccaagcagacccagaactatggacatatctttgacccctttctccgttggactaccaccaagcctcacctaccatattgaaggccacctcttccctcatctgtgctctggagatacgtccatctgccatgctcctagggtccctcctcctattctttgatctttctttacaaccgtgacagtaaacccacagagcccatcctttgtgacacccacccttcatggtgcagtgcctgccagcagccccatcctgtgagtccgttcacatcattccaatgttcagatgccaagagcagcacaagccatttgcttaggcatttgtcatggggacattgtccctctctagcccgtgtcagcagagagagttggaaggtggtgcatgactatggcagtagtgaccggaagctcagcaggtgaactgggtgccttggctctccatgggtagtgtgagcttccttacagcatgagggatgtctatgaaaatacaagaacctccaaaagtgtgcatgtgtgcacgtatgtgcgcacacatgggtgtgtgtatgtgtaggtacacttaacctatttgtgtatgtgtggagtccagaggttgacacaggtggcttccttccttgatcacttctctaccttgtttgcatcccattaggcacacatgtgggggttgcatgtgcaggcccaaggttgatgttaagaatcatcaatcgctttctccaaggcagtcttttttgtttgtttttgttttgttttgttttgtttttcgagacagggtttctttgtatagccctgactgtcctggaactcactttgtagaccaggctggcctcgaactcagaaatctgcctgcctctgcctcccgagtgctaggattaaaggcgtgaaccaccatgccccgcttctccaaggtagtcttaatcaaatgcagagcttcggatagtggtctttttaaccagcctgctctaagggtcccattgaagttaaggtttctattgttgtgatgaaacaccatgaccaaaagcaacttggggagaaaggatgtatttcagctcacagctttacagtttatcactgaaggaagtcaagacaggaactcaaggcaggaactgaagcagaagccatggagggaacctgcttatcgccttgctcaggctgctttcttatacaacctaggagcactagcccaggagtgctgtccacagagacctgggcccgccctcccatattaatcagtcaagagaactccccacaggcaaatctggtagggatgttctctcaactgagttttctcctcatgtgactccagcttgaccaaagctaaaaacagtcctacaagccaggacacaatctccacctactgaggctgaaattaatggggtgcacaacactcacttggcactcatgtggttctggggggacaaactctggtctcatacacagccagtgctttggctataaccattggaccacctttttttttttgagagctttgactctttcacccgtagtttgctgttttagcctaggctatctgggtagtgagccctgggggttgatcctcctgcctccaccacctgacactggggttatttatacacatgcactaccacacccagctttttatgcgagtggtggggatttgaactctagccctcatgtttatgtagccaacactttacccactgagccaccctgcctcctctgaagtctcagatctgtcctgacattgccactgccctctggtcaagcaatgcagagctcagactcagggtgagggaactaactccacctatccatggaaaagtgtctctgatgattttaaagcagtgcagaatttggccccatgacttgtctcactcgtatccctgccctagggccactggtggattaccaacttgaccagatttggaattgcctagggacaccccaccagtcatatctatgaggccatttccttccagagatgtttatgtgggaagaccagagttttggtggaaccatcttgtgggctggagtcccacatggagtcaagaggagcaagagttgagcttgcactcccgctgctgggccttttctgccgtgatggaccacaagctaaagtaaacccttcccatgcttaactctctcctgtccgggattttatcacagcaacatggacagtaaccaatacagggcctttgtgccctttccttctcttgctgaatacgattccatccagacttggggtccctgctcagcggccctcccctatcaaaaattgcaccaagggctggcaagatggttccctggacaaaggtgcttgataccccaaattccatcgggattcacaaagtggaaggagaggaccccttcaaattgtagtctgacctccatacacacaccatgacacaggtacacgaatacatactacagttgcagccagcactgtgttccttggcaggcaatatcctgctcccccaagccgtagtctgtctgcctctctgggctgaggcttgatggttcggctcaggaagcttaccctctctggcccctcacgtcctccatccctcctgcaggcaggaggctctttgtaaagacatcaactaaaccactgctccctggctcccaactgctcaaaacccgcctctgccttcctgtctcacagtccagtgtccaatgtaccagtgtgtgaatacaaagtctttattgataaattatgattaaacattgtgacagcttattagacaataaaagcttcagaatcgccatctccccagccctggccctagctactagcctcagccttcttgctgggagccttggaggaggtcttgggaagtaactcaggcctgagtgttctcaggggtctttgccttcctgaccctaggtatgggttgtactttgtgtcctatgtcctgggaaggagtgggcactttggtctcctgtactgtctcagccccctgaacaactgtcacagtgtgggccatgtctgccatcttccttttggcgagggaagcaacgctattctggacctgtaaaaaagcaaaaagagtggtggggagataactcaagccagcagagcatttacctcacaagcacaaaggcacaggcttccttcccagagcccccacacaagcctggaaggacttgagacacagtgggcaacagacacctacctaccttgctggccaagggcttcgatttctcacctttggttttcccatgggcatttgcttctgtaagatggagggagtagtaagggacaaagggtctacaggctctagagttctcagtctgcctagatcccaagttgtcgcctgaacaggcacctgaaggccatgtgacctgggtcagctgttttacccccaaatctcaggcccctgcaaatcagacaagatgtctctttacacaacgtgggaacatcagcttagttgcctacctgccaatggtagtactttaatatgtgtacgtgtacgtgtatgtgtatatatacacacttttttttcaggagggtagagttgtttgagactgagtctcacatgacccagaccaatttcaagctctatataaatgtaaagatgctgccttgaacttctggtctttctgcctctcacccccaagtgctcaggattctgggtatgcaccagcttccttgatggtcttaaaaccatcactcactgctccctgccagagccctctcatagctactcactgctctaggatgagcccagactccttagtgcaaaacccccttgaatttcttctgacctcccatacagagagagacacaccccctggcagctcttcagcctttctgctcagatgcaacggagatgcctactccaagaagcctttcctgatcctgtctcaaggctgctacaggctctccattcctttatccaggtctagcactcaaggcccacttcctacggagggaaaccccttctatcctgcatccctggtggctgctggggacctcctgtccctgccacccatgcacacacctaccttgcctgctcccactgcgtttgaccttctggcctccattggcagtcagaggggcccctgctgctttgtcttgttttaggggagcctttctgacctctttcggtttcgccttggctttcttaggtgccatctccagtgtggctgccttgcaagggtaagccctcctcttctgccctttctccatcgtggccttgccaacttggtctttcttcagcaatccagatttcttggagcctgtctccttggcacctgcagctcccctgccggctttgggggcacaggctttctttgtcttgggctttggaactagctaaagacagagtatggggttggggtgagaacagaagctctggatatccctataccccacacaggacaccaaaggggccatgctcccaacaccagggttaagaagaggagaggagacacatctacccctgtggtcctcattgcatttcacctggtgttagtctcttgtctccctgaagtgccctgctgctcacttctaaagatctgtatcttcctatcacccacttagcctcaagcctcactctgcccctgctccctgaagtcccacctctttcaatatctccaagaatacagactgagaggagagaggactgatttcccagcttccctcaggcttgtaatttgaggctctattgagccacttgccccacacacacacacacacacactccaactaggtcccagtagtgtcccctaggccctagcagagctccccaggattgggacttcttgagatgggcaccccagtaaccacaggtaccacatgaggctagtagagactgccccagtgcccctcccccagaagctgtgggtctgtggctatgtggtggacaccggcaagaagccacatacacagaccctgatactgtgcgggctccccacagtgcacagtaagggtcagcagagggctgtggagggagatgtgggctgtggcgagaagcagcgtgtactaagggtctgaggcctccccctccttctccgtagctcactttgaagctgccagtggcacccttggccttggagtgagcaggcctggtgaggaggcctcgacgaacgccagtttccagagcttgcttcaacaggtacttgaaacgggtggtgtccactgtcgggtacttgtgttggatgtagaccttgatggctacaactgatgtgccctggcgtgcctcccgggccttcaaagcctctagcaccatgtgcagcattgttgggttcctttggcctgcttggattctgcggcaacttggacctgtgggatagacagaggggcatcacccagactgccctctgccccggtcaaggcctgctttggtggggcagagcacacacacactgagaaccagtgacatcactagctgctaggctgcaagccttacacagaccactgtccctacagggctcatcagggtccctccttttgaagaatattctctctctctctttttttttttctcgagacagggtttctctgtagccctggctgtcctggaactcactctgtagaccaggctggcctcgaactcagaaatccacctgcctctgcctcccaagtgctgggattaaaggcatgcgccaatattctctgggagaggcaatcccgggtaggttagctgcccaagggtatctacagctgtagctgtattgtactcgaagaagtaaatcaggaagcatagtgaggcccatgttggcttctcttacatacacgtcaccttgaagaaggcaccaaagaccctggggacaaaaacactgagaaagcaacatctctgccaaatgccacagggccctgttcagactcataaggacttgaaaccaccaccctagaaatccaggcatggtggagacatacctgttaccccaggactccagacacagaggtggaaagacttatttccagatgagcctggggctacagaacgaggtggtacctcaaaaataggatatacacaaactcaaaatccaactggacaaagaaataaccaaatattcacagacactgggaggaagaggtaacactgaagtctttgtttgtttgtttctttgtactcctcatgacccaacccaaggcctggtgcatgcatttcaggcaagtgttctagcactgagctgtaccccggcctgacagccctttcttaaaggttcagctctttggaaatcaaccctggactatttccagctgagatgctgggcctggcacatgtctgagataagccagtgggtaagcaaaagcagccacagctgaggacggccgcgcctgacgggcacaggggagggactcagctgctcccagcccgatttcctctcagtctcagaaggtttcctaacaagatattagcatcatctgtgggtcctagactttgtaaatatgaagtctgtgtccacagctggaaagaaagaagaagtgaagctctctggggagcaaaggagtgaggagggggaggggaggaggattgggagggagatgctcacactcacattacattatatgcttgcttgaaaaaggcctcatgtgcagagttataaaagtgaaaataaagggagccttactacgtagctctcactagcctggaattcactctgtagaccaggttgaccctgaactcaagcgatccccctgtctctacctctcaaatgtgagctcaacatgtttaaaagaaaattatttggggaaaagcaaaagaaagaacagtcacattcctagagacaccccccgccccaagtgagaatggaagcaaagacgtaagggggtgaagaagcctgggctcagcgtgccgactgaggccctgggctccatccctagccccaccagctgtgtgcctgagccgttctccccaacagcccaaatgcctgtgaccactcacacaatggaatactacttggccataaaggactgagatttgagagctaccacacgagtgcttctaggtataagcaggcaaaaaaaaaaaaaaaaaaagccagtcacaacgccttgtatgaaatggcgaggacccacagacacaggtggagtgaagtcggggagtgactgttaatagcacaagtcagcttttcttctcaggaaatgactcaattctgaaacagattgtggcgctgggcacacatgataacatactaaaggtcactgcatgctgaacttgggggagcgatggggtattttgagatgggctgttacttttgaaaagcagcaagaaaaaggaggatttgggggggagaaatgggagaacctgtcggcgtgacttaaactcagggtgatgctgtcagaattatttgcaaaattcagactcaaaatttaagtttagaagtagaaagaaaaagccatcggctggagagatggctcagtggttaagagcactgggtgcttttccagaggaccagggttcaattcccatggcagttcacagctgtctgaactccagttctctgaaattctagttccattgggtccagtaccccgacacagacatatgtgcaggcaaaacaccaatgcgtgtaaaagaaaaaagaaagaaacatgaaacaacaggccacgggcctaagggagtcctgtagcagggccgaggcagcctgcacctgactgaagtcttcactgtgagtcccagaccaggaaatgggaccattcagcttcattccccaccaggactaggtctcctcttccaatccgagcgagcggtgggaaccaggcttaagccgcatgcaccttctcagcggctgtctccgggctgtctcccggtttccagggaccttggcctaaactcagaattccactcccttgcttacctggcttgtcagctccagggagcccacatgatccagaaggggatgtgtccctggagggaaaagaggaggaagaaacactggagacactcccaggagccatggcacaggcagcagcaggccaggccagtgctcgctcagttagctcagttagctccagaccttctgccttaaatacctcccaacagaacttaaccaatgaccaacatgcctagcacctgagcagccgaaagctgccaatcaggcctcgagggtaagactcactctgaacacagcatccaccttaccctgtgggacctgagg

SEQ ID NO: 821 - DNA, 6092 bp, Mus musculus
agatccagcgccgtttcccctcgcccacgcccaccaacaacttcgccctggacggcacggcgggcaccgtgtacttggcggcagtgaaccgcctgtaccaactgtcgagtgccaacttgagcctggaagccgaggcgaccgtgggtcccgtgccggacagcccgctgtgtcacgccccgcagctcccgcaggcctcgtgcgagcacccgcggcgcctcacggacaactacaacaaaatcctgcagttggacccgggccagggtctggtggtcgcgtgcggctccatctaccagggtctgtgccagctgaggcgccggggcaacatctcagccctggccgtgagctttccgcctgccgcgccgaccgcagaaccggtcaccgtgttccccagcatgctcaacgtggccgccaaccaccccaacgcgtccactgtgggactggtgctgccgcctacctcgggcaccgggggcagccgtctgctcgtgggcgccacgtacaccggcttcggcagcgctttcttcccgcgcaaccgtagcctagaagaccaccgcttcgagaacacgcccgagatcgctatccgctccctggacgcgcgtggagacttggccaagctcttcaccttcgaccttaacccgtcggacgataacatcctgaagatcaagcagggcgccaaggagcagcacaagctgggcttcgtgcgtgccttcttgcacccggcggtgccaccgcacagcgcgcagccctacgcgtacctggcgctcaacagcgaggcgcgtgcgggcgacaaggacagccaggcgcgcagcctgctggcgcgcatctgcctgccccgcggcgcgggtggcgacgccaagaagctcaccgagtcctacatccaactgggcttgcaccgcctcgtgtcggttttccccgcgcgcgagcagttcttcgctgtcttcgagaggccccagggcgccccaggtgcccgcaacgccccggccgcgctttgcgccttccgcttcgacgacgtgcaggctgccattcgtgcagcgcgcaccgcctgcttcgtggagccggcgcccgacgtggtggcggtgttggacagtgtggtgcagggcaccgggccggcctgcgagagcaagcgcaacatacagctgcagccggagcaactggattgcggagcggcccacctgcagcacccactgaccatcctgcagccgctgagggcatcgcccgtgttccgtgctccagggctcacggccgtggctgtggccagtgccaacaactacacggccgtctttctgggcaccgccacagggaggctcctcaagatcagcctgaacgagagcatgcaggtagtaagcaggcgagtgctgactgtagcctatggggagcctgtgcatcacgtcatgcagtttgaccccatggatcctggttacctatacctgatgacatcccaccagatggcccgagtgaaggtggcagcgtgtgaggtacactccacctgcggggactgcgtgggtgcggccgatgcctactgtggttggtgcactctggagacccggtgcacactccagcaggattgcaccaactccagccagccacatttctggaccagtgccagtgagggccccagccgctgccctgccatgacagtactgccctcggagattgatgtgcaccgggactacacaggtatgatcttacagatctcaggaagcctgcccagcctcagcggcatggagatggcttgtgactatggaaatggcgttcgaacggtggcccgggtacctggccctgcctatgatcatcagattgcctactgcaatctcctgcccagggcccagtttccatcctttcctgctggccaggaccacgtgaccgttgagatgtctgtaagggtcaaaggacacaacattgtctcagccaatttcaccatctacgactgcagccgaattggacaagtctacccccatacagcctgtaccagctgcctgtccacacagtggccttgctcctggtgcatccagctgcattcatgtgtctccaaccagtctcagtgccaggactcgccaaaccccacgagtcctcaggactgtccccagatcctgccctcgcccctagcgcccgtgcccacaggtggctcccaagacatcctggtgcccctgactaaagccaccttcttccatggttcctccctcgagtgcagctttgggctggaagagagctttgaggctgtatgggcgaataactcactggtccgctgcaaccaagtggtgctgcacacaacccagaagagccaggtatttccactgagtctgaagctgaaggggccgccagaccgattcctagacagccctaaccccatgacagttgtggtctacaactgtgctatgggcagccctgactgttcccagtgcctgggccgtgaggacctgggtcacctctgtgtttggaatgatggctgtcgtctaagagggcccctgcagccactccctggcacctgcccagcccctgaaatccgagcgattgagcctctgagtggccccttggacggtgggactttgctgaccatccgtggcaggaacttgggccgtcggctcagtgatgtggcacatggtgtgtggattggcagtgtggcctgtgaacccctggctgacagatacaccgtttcagaggagatcgtgtgtgccacagggcctgccgcaggggccttctcagacgtggtaacggtgaacgtctccaaagaaggcaggtctcgggaacagttctcctatgtgctgcccacagtccactcactggagccttccatgggcccaaaggccgggggtacaaggatcaccattcacggcagtgacctcaacgtgggctctatgctccaggtcctggtgaatgacacggacccctgcacagatcttacgcgcacagccaccagcatcacctgcactgtgccagggggtaccctgccctctccagtgcctgtgtgtgtgcgcttcgagagccggggctgcgtgcacggaaacctcaccttctggtacatgcagaacccagtcatcacagccatcagcccaggccgcagccctgtcagtggcggcaggaccatcactgtggctggcgaacgcttccacatggtgcagaatgtatcaatggctgtacaccacattggccgggagcccacgttctgcaaggttctcaactccacactcatcacctgcccatctcctggagccctgagcaatgcttcggcgcctgtagacttcttcatcaatggccgggcatatgcagacgaggcagccgaggagctgctggaccctgcagaggcacagaggggcagccggttccgcctagactacctccccaacccacagttctccacagccaagagggagaagtggatcaaacatcacccaggagagccgctcaccctcgtcatccataaggagcaagacagcctggggctggagagccatgagtaccacatcaagattggccaggtgtcctgcgacatccaaatcatctcagacagagtcatccactgctcagtcaatgagtcgctgggcacggctgaaggacagctgcccatcacaatccaggtggggaacttcaaccagaccatcgccacactgcaactggggggcagcgagacggccattgtggtgtccatcgtcatctgcagtgtcctgttgctgctgtctgtggttgctctgttcgtcttctgcaccaagagccgccgtgccgagcgctactggcagaagaccctgctgcagatggaagagatggagtctcagatccgagaggagatccgtaaaggctttgcggagctgcagacagacatgacggatctcaccaaggagctgaaccgcagccagggcatccccttcttggagtacaagcacttcgtgactcgaaccttcttccccaagtgctcttccctctatgaagagcggtatgtgctgccctcgaagaccctcaactcccagggtggctccccgccacaggaaacccacccactgctgggagagtggaacatccctgaacactgtcggcccagcatggaggaggggatcagcctgttctcctcactgctcaacaacaagcacttcctcatcgtcttcgtccatgctctggagcagcagaaggacttcgcagtgcgtgacaggtgcagcctggcgtccctgctgaccatcgcgctgcacggcaagctggagtactatacgagcatcatgaaggagctgctcgtggacctcatcgacgcctcggcggccaagaaccccaagctcatgttgcggcgcacggagtctgtggtggagaagatgcttaccaactggatgtccatctgcatgtacggctgcctgagggagacagtaggtgagccgttcttcctgctgttgtgtgccatcaagcagcagatcaacaaaggctccatcgacgccatcacaggcaaagcccgctacacactcaacgaggagtggctgctgagggagaacattgaggccaagccccggaacttgaacgtgtccttccagggctgtgggatggactccctcagcgtgcgggccatggacaccgacacgctgacgcaggtgaaggagaagatcctggaagccttctgcaagaacgtcccctactcacagtggccgcgggcggaggacgtggaccttgaatggtttgcctcgagtacccagagctacgtcctccgggacctggatgacacatcagtggtggaggacggccgtaagaaactgaacacactggcccactacaagatacctgagggcgcctccctagccatgagcctcacagacaagaaggacagtaccctgggcagagtgaaagacttggacacagaaaagtatttccatttggtgctacctacggatgagctggtagagcctaagaaatctcaccggcagagccaccgcaagaaagtattgccagagatctacctgacccgcctgctgtccaccaagggcacgctgcagaagttcctagatgacctgttcaaggctatcctgagcatccgagaggacaagcccccgctggctgtcaagtatttctttgacttcctagaggaacaggcggagaagagaggcatctccgaccctgacaccctgcatatctggaagaccaacagccttcccctgcgcttctgggtgaacatcttaaaaaatccccagtttgtcttcgacatagagaagacggaccacatcgacgcctgcctgtctgtcatcgcacaggccttcatcgatgcctgctccatctctgacctgcagctgggcaaggactcacccaccaacaagcttctgtacgcgaaggagatccctgagtaccggaagaccgtacagcgctattataaacagatccaagacatgacgccgctcagcgagcaggaaatgaacgcacacctggccgaggagtctcggaaataccagaatgagttcaacacaaacgtggccatggctgagatttataaatatgctaagaggtatcgaccacagatcatggctgccctggaggccaaccccacagcccgcaggacccagctacagcacaagtttgaacaggtggtggctctgatggaaaacaatatctatgagtgttacagcgaggcctgatgcagaagagtgaccaggagcttcggccagggagacggcgtgcaggccacttggcctccacttggtttctgcccattgcccacagaacggtggagagagggggacaggctgggggttcctggccccaggaaagggaggaaggcgaggatgcagggctgtagctggactactcagtcttcctggaagtgtttctaaagagcaccacttttttttgttttttgttttttaagaaaaaaaaaacttttatatattaaaacaaaaacttatgcaccaactgtgaatagctgccgcttgtgcagatccccaggggctcccggtgacacactggaaatgactgttccaggggacagaaaatactcatctgtccccagcacagcccccaccccaccccccatagctgctgagactggctcacagcccaagggggctgggctggaggggaaggctgggactctctggaacattctttataataaaagcctgccgggaaaacctact

SEQ ID NO: 822 - protein, 1849 aa, Mus musculus
IQRRFPSPTPTNNFALDGTAGTVYLAAVNRLYQLSSANLSLEAEATVGPVPDSPLCHAPQLPQASCEHPRRLTDNYNKILQLDPGQGLVVACGSIYQGLCQLRRRGNISAVSFPPAAPTAEPVTVFPSMLNVAANHPNASTVGLVLPPTSGTGGSRLLVGATYTGFGSAFFPRNRSLEDHRFENTPEIAIRSLDRDLAKLFTFDLNPSDDNILKIKQGAKEQHKLGFVRAFLHPAVPPHSAQPYAYLALNSEARAGDKDSQARSLLARICLPRGAGGDAKKLTESYIQLGLHRLVSVFPAREQFFAVFERPQGAPGARNAPAALCAFRFDDVQAAIRAARTACFVEPAPDVVAVLDSVVQGTGPACESKRNIQLQPEQLDCGAAHLQHPLTILQPLRDVFRAPGLTAVAVASANNYTAVFLGTATGRLLKISLNESMQVVSRRVLTVAYGEPVHHVMQFDPMDPGYLYLMTSHQMARVKVAACEVHSTCGDCVGAADAYCGWCTLETRCTLQQDCTNSSQPHFWTSASEGPSRCPAMTVLPSEIDVHRDYTGMILQISGSLPSLSGMEMACDYGNGVRTVARVPGPAYDHQIAYCNLLPRAQFPSFPAGQDHVTVEMSVRVKGHNIVSANFTIYDCSRIGQVYPHTACTSCLSTQWPCSWCIQLHSCVSNQSQCQDSPNPTSPQDCPQILPSPLAPVPTGGSQDILVPLTKATFFHGSSLECSFGLEESFEAVWANNSLVRCNQVVLHTTQKSQVFPLSLKLKGPPDRFLDSPNPMTVVVYNCAMGSPDCSQCLGREDLGHLCVWNDGCRLRGPLQPLPGTCPAPEIRAIEPLSGPLDGGTLLTIRGRNLGRRLSDVAHGVWIGSVACEPLADRYTVSEEIVCATGPAAGAFSDVVTVNVSKEGRSREQFSYVLPTVHSLEPSMGPKAGGTRITIHGSDLNVGSMLQVLVNDTDPCTDLTRTATSITCTVPGGTLPSPVPVCVRFESRGCVHGNLTFWYMQNPVITAISPGRSPVSGGRTITVAGERFHMVQNVSMAVHHIGREPTFCKVLNSTLITCPSPGALSNASAPVDFFINGRAYADEAAEELLDPAEAQRGSRFRLDYLPNPQFSTAKREKWIKHHPGEPLTLVIHKEQDSLGLESHEYHIKIGQVSCDIQIISDRVIHCSVNESLGTAEGQLPITIQVGNFNQTIATLQLGGSETAIVVSIVICSVLLLLSVVFVFCTKSRRAERYWQKTLLQMEEMESQIREEIRKGFAELQTDMTDLTKELNRSQGIPFLEYKHFVTRTFFPKCSSLYEERYVLPSKTLNSQGGSPPQETHPLLGEWNIPEHCRPSMEEGISLFSSLLNNKHFLIVFVHALEQQKDFAVRDRCSLASLLTIALHGKLEYYTSIMKELLVDLIDASAAKNPKLMLRRTESVVEKMLTNWMSICMYGCLRETVGEPFFLLLCAIKQQINKGSIDAITGKARYTLNEEWLLRENIEAKPRNLNVSFQGCGMDSLSVRAMDTDTLTQVKEKIAFCKNVPYSQWPRAEDVDLEWFASSTQSYVLRDLDDTSVVEDGRKKLNTLAHYKIPEGASLAMSLTDKKDSTLGRVKDLDTEKYFHLVLPTDELVEPKKSHRQSHRKKVLPEIYLTRLLSTKGTLQKFLDDLFKAILSIREDKPPLAVKYFFDFLEEQAEKRGISDPDTLHIWKTNSLPLRFWVNILKNPQFVFDIEKTDHIDACLSVIAQAFIDACSISDLQLGKDSPTNKLLYAKEIPEYRKTVQRYYKQIQDMTPLSEQEMNAHLAEESRKYQNEFNTNVAMAEIYKYAKRYRPQIMAALEANPTARRTQLQHKFEQVVMENNIYECEA

SEQ ID NO: 823 - DNA, 71655 bp, Homo sapiens
ggctgggctgccctagcttaagggctgatccccccaaggccagaagctggaccactcaaggttggaggctagaccacctcagatcagagactggatcatccagggccacccaaggtcaggccgaggcctccaaagcagagatctggctcttggagattgactataaaatcgcatgtttcatgaagaagccctcattcagccacagggcatcaggacctgtcagaggccctgacagaaaaggtcccgatagcctccaaggcccaaatccccagcgtgaaccacagaccctgggccccggcaggccttggctcccagccacagccctcgtgcaagtccactccatcagcctgttgcccatgcagaccttggcttgtacagccacctccaccacataccaggaattcccatgtgtgtgcatgtgaccccaatatgcaccccatgcacacgaacacacattatacccctcctcacatgcatggcaccccatctttgcacagaccaccccctcatgcccacatgcacacacacaatggggtatccctgagacaggggctttcacaggctggtacaggctgtgcaagaagctcactacagggcgggacccctaatgcctctctcttggtggctgggagctgggccagtgtgctgcggcccatgtgctgtggcccctgcccttcctggacagctctgggaaggttcttcccccttcagagccatcagcctggggtggcagcttccacttctgtgagcgtgcacagataaacaatccctgtggtggctgccaaggggaacccgcacccagtggagcccctgtgcccagaggctgggctggtggttgggaccctctcaaagttaacacccccaagaacgagccctggatcctccaccagcctgctgctggcctctcaccctcctctgctcgcctctcaccctcctctgctctgcccacacgggcctctgtcctccagggctccgcccttgctgtgccctgcctggaaggctctcttcaccctcctgactctgctgcatcctgcagatctcagccccaggggcccgaggaagatgggctggagtccccttgggagaaacttttccagaaccacctggtatggctcctttgtaagatgggtggctctttgtggttgtgtaattatttgagttatttggttaaagattatttgccccctggggtagggctgaagacaaggaccatgcttgtgggctcactatgatatcccagtgcctggcacatagtaggtgcttagttaagggttctttctgaaggaaggagaaaggaaggaagaagggagggagggagggagggagggagaagaatgaccctcagtgttctattccgcccagggttttgcttgtgtgtcatgagatgagggacaggaccctcagaactccaccagtaatcaggtgtgaacggtcaccttgggggccagtgggtgtcccagatgaggcaggaggtgcaggagggctgatgtggcctgctcttatgaggggcagtcagtagggccaatggacagtggggacagggaggtcgctttggcagcatctgcctggcactgcccggggagggggtctccagcagccaacatgaccatcctgcctgctgggggggcatgtcctggggtggtgctggcagccatctgcccagcccaacatttattagtagtgatcgtgtgttccaccctggaagcgctcccagtgcactggggaagtcacgtgcccttgcactgggtgatatgaggtttgataggaggagctctaagtgggtggaggaactcctaatactgctttgaggctcaaggaagtcttctcagaaggtctttagactaggtcttgagggaggcctaggagttcactaggaaagactttccagagaaggtgaaattgggttgggtcttgagggatacaaaaagttcactcagaaaacaagagaggaaacaccttttctggacactgggttctctctaggggctcatgtaggccatcagaccagtaagaccacagtattccgggaccctgctcacccatgccagcctctcctgtacgccctgtgtgtgaccgtatgggtgagggcccctccactgccccatcctagagcggttgggattgtgccagtgtggagtgtgctcggcacacagcaagtgcttggtcggagtgggctctcagaatcgtgcagctggtccgaggtggggccatgtctagggtctgcagcttgcatactcgtgacaggcactcaccctgccgcaggcagcccttccttctccagacccagcagcagtttcaaaagatgagtggggccttgtcagtccccactgagttggctggaaccaagtggtgaggttggggccactggaagggaaaggcctggtcgggaagcaggctcacctggattttagctcacacctgcccggcctccctgaggcttccaaggatggcttcattcccagccaggtctctcaggaagcatggaaggtgagaaaacagttctcagaagtttactggggcataaagggagccaggaagccttacagggtggaaacgggtctgaagtggggtgtatgtgccagcccaagacttaagagaaccccttggggcccattggcactggggcctggggccatggagactcaagttcattaagaacaggactcaggccgggtgcggtggctcacacctgtaatcccagcactttgggaggccgaggcaggcagatcacgaggtcaggagttcgaaaccagcctgaccaacatggcaaaaccctgtctctactaaaaatacaaaaattagtcgggcgtggtggtgtgtgcctgtaatcccagctactcgggaggctgaggcaggagaatcgcttgcacccaggaggcagaggttgcagagctgagatcgcaccacttaactccagcctgggcgacagagtaagaccccgtctcaaaaaaaaaaaaaaaaaaaaaaagaacaaggaatctggaatccaggttctaccacgtactagctggtgacctcaggcaagtcacctcacctcctgcctcagtttccctacctgtaaataggtatgttcacggtagggttattgtgaggtttaaatacattaatatatgcaaggtgtttagaactgggcctagcccatagaagggcactagaagtgtccgttgttttggtacctgctatgaagcataagctcatgcacttgctctgcaggggtgggggtcggggggcactgaggaggctgaggtacctgggggagcacccactaagtgacagactccagggagccactgaggaaagacccagcccctgctgtcagcaaagaccaaacttgatcagccaactctattggaagccagaggcctcatctcattttgcagaagaggaaattgaggtccagaggagggtgcaggtctggagggggcaggaagggtcttgatgtgaagccctgacgggggcgggggcagaagagctggcctgtgtgcatctgataaaacacgagccaggcctgctccgtccatcccgagggcagggcagggaagcactgggaagtcagagctgggggatagtgggagcagcaacgcctccccctccaatgattggaagcaaatgtcactgactatttgccatgagtcaggggctggctaaatgtcctacagggatgacctcatttcatccccacagtctgcagaggcagtggctgtcatacccattacacaggtgtgggaatggaggcctggagtgtggaagagactcacctgtcacacaggcagcacgaggctgggatctgaacccagatccagggccacaggatgatgactccacagcctcgactggggtgccacctgcccctcactgggctccacccctggagaacagggaacagccagacctcagtgaaaatcccagctccaacttgggcggctcggtggccccaggcaagttgcttcctgtggggcctcagtcccctcctctgtaggtgggcctcacagtccctcccttgtgaagacggccttcatcctggattctcagtgacgttgtacacggccataagcctgccccatgtgctcctgctggcctggctgtctgatctgcccctgtgtattccctcagccctcctgccacggggtgtggtcactgttgtgtccctaaggcaaacagtaggttctcactcaacatccactggattagtcatggtcagacagacaccggttcaaatccaggaccagggcctcatctcctgagcctcaatttatgcacctatcaaatggggtcagctgcacagctgtttgatggcttttataaggactggctggcaaatgtttaacacacagaaggtgctcaacccacacaacgcccagtcctcatcagccctcggctttccctgctccttgtagctcctgtcattggggatgtggtcattaagcacctactgtctgtgcagggagcgcctgcctcccagcccactcaggcggttgtcgcctggagatggcagccagggaatgtgggtgggggcccccgcggcggccctgcccctctgaggcttctgctggacagaggcctcagtgtggagctgcccgggtcctttcacgggcccagacccatgactggacgtctgagaatgccgcccattatccaactcacagagcacaaaggggccatgcgggggctcggcaggccaggcgcccccagtgagcacacggggctccgggtccccaccccggcccatgagtcccctgagcacagagggcaaggacctgcccagagtcgggagagggcgtcgttcacatgcaggaatgagaaccatttcctccagccccacggggacacagagatgagaggaaccaccctgggggctgggcttgagggccagggcaggccatcgctcctgggcccggaaaccagacctggaaggtcgcctcctcctccagaagaggcagagagggaacacttcaggggccaggaggggcccctagaatgtgaagggtggcaaagcctcgaggtttccccagtggcatccacagtggagaagccacagcactgctgtctggaaacacggtcaagaggggtactgtctcctgtcggtgccaccactggagggtcagcccgcccctcccgagccacactagtggggcacgatggcaaagacaggagatgcagcgtggaggggcagcggggcagggctcactttgccacctgtttgctgtgtgacctcgggtgggcctctaggcctctctgagccttaagtgtctgtgctcaggaggagaggggaaggaatgatcacgcaggccctcgagacccttgggtgggtgattaaaggaggtgatctccctgataatcatcatctgggtggagggagccctcctgaggggttcagaggataggctggagaagcccacatgggagctgaggctctagggcaggaagtcagcagacttcacacttcatgatgacacacacatgccccatcctcacagcggcccacggaggcagatcatgctcctctttccagatacggaaactgaggaccaagaagcagtggcgccgccgtggtcatgcagatggttagggtcaggcctctcagccccaagcaaggggcgcagggatgcagcggctgagagcagggcctggacgcctggaggctgtgcagctgcaggccagtggcacaccactctgaccttaagtgtccccatctgcaaaagtgggttgatcaaaggtccatcaatgatagactggattaagaaaatgtggcacatatacaccatggaatactatgcagccataaaaaaggatgagttcatgtcctttgtagggacatggatgaagctggaaaccatcattctgagcaaactatcgcaaggacagaaaaccaacactgcatgttctcactcataggtgggaactgaacaatgagaacacttggacacaggatggggaatatcacacactggggcctgtcgtggggtggggggagggggagggatagcattaggagatatacctaatgtaaatgacgagttaataggtgcggcacaccaacatggcacctgtatacaaacgtaacaaacctgcacgttgtgcacatgtaccctagaacttaaagtataatttaaaaaaaaggggggttgctaagaccccccccgcagggttgctcccacggggaaatgagacgggtccagcccccgagaagcagcagtgatggctcccggcaccacctaggcccatggctggattgccaagccgtccctaggactcttgtttccagcaccttcctgtggctgaggcggtgctctaaagcattaaccttgcaggggcatttcctgcaaggaaacgttctcagaggccaggcccaagggacaggagggcaggagccccctcctcccagcgcaaccctggccccactgttattttttccaattgaagaagaaaaacatttcctctgtctcctcacagctctgccctgggcagtcagaggtgagaatggacaggacagggtgggaagcccacccagtggggtggaaggcccaggcccgccttctccgagccagcatagccgttgaccaccgtgccccaagcaagactgccctgactcggccaccaggtcctcgtcttcaaaggcactgctggacatttcccaaatttcaggcattttggtggcatctggattatcacctatttcacatttgtctttaactcacttttaaaggacttcaatcaatgcatttatcaaggaagctttacatcattactgtacatggaaaaccagtagcacttgccaaaaccagaaagtaacggcaagtacaaagaaaacaaagcgctatcagtacattctagcacgctgatgtcaacagccctgagtttgagaccttctctctattaaaaagagacagtgacaaatgttacagtcattaaagacatgttagcctcaaaccaagaccttttccttgatataatcagacttgaacaaaaactgaaaaaggcccaaattgcagtgtgaataaccaactaggtctggctattctgggttagttcattccaagttagttattgctgggtcccacctaatccccactcctgagtacctttcatctccccttggttccctccaaaattccctctggaagaacacctcattgcatcttagtaaggccagggaaggtgtggtttgttccttcctttattcattcattcagccagtaattgtcagcacctcctctgcccagccaggggtataggggctgccaccatgagccatcctggcctgatggtgctcccagctaatgggtagaagggagaaatcataagatgtggagccagatctgggtttcaatccttaccttgctaatgcccctcagtttccccatctgtgaaatgggtttgctgaccacagcctagtcagctggctgcaaggatggtgtaagatctggtagggcagtgctgggcacaggattcactctcaccgtctggtggctctgctagccacattggggctcaggacaggaggtggagccctggtctttagttgcaatgccccccaccccaactcctggctctaacatgggcttcaggggtcatggttcactgccacaaggcggggagaaactggtgtttgctaagagccttgttgtgcttgacacctgttatgttatattctccatctcacaccctcccaggggcaggtgttctgctacgattgtcctcattttacagttgaggaaactgaggctcagagagggtgagtgccttgcacaagaccacacagcacttctcacctccagttgatgtgaggatactcagacccgaatacccttcacctagagagctcctaaaccccactgctcagcttggcagggagcttgtgtcccaagtgcccaggatcatcaccacaggctggtctaagacaacactgagcattatcctcacggctcagtggggggagctgcaggatgcagcaagatgaaccagatgagcgggagacaggaaggaagagaggaggggctggagagggagtgggggtgagggatagggagggagacagagagagagacagagatagagacacagagagacagatgaagagtggaaagggaagggggcaagacactgagagaaggagagacaaagagagtgaacgggaggagcaagacagataggaacagagatgggtgggggcaggagagagagagataagacagagagaccagcggatggactggggtgggggcactgaggatgtgagtgaggaggaggggcatggaggcaggccccatgcacccctgctgggctctgcagttggcccccacgggtggcacgatgtgcgccttctccatccagagaggaagacagggacacagtcccacgggcagtcccctgagtggctcttggtgggtggatgggcctgggagggggcctccaatttcctgcagctcaacactcccggccatcaaagcagtggccagaccagggctgaggggtctggaacaaggcgggcaggatggcaggaaggcgagggtgttgagggaagtggggggcggctgcaggcccagcctttcctgccggccccatggtgcacagacacccctgcccttccttcctggttgggtgggaaagaggaaaatgaggtcccgctactctcagagtgaggcccaccgggcaccctgtggaagctgggggtctgatgggaggccccgttctgagaggtcggagctgaagggcttttgctttcaaacactgtagctctgctcctcatgagctgtgcatcttgggccagtcccttcccctcagccttggtttccatatctggaagatgggttaccaatagcgctcgcctcgggggaatctgtgaggaaaaagagagcccgtacatggcaagtgcttggcacagtgtctggcacgggctagccctgtgtgagcacccccgtaaaacagccacggcgcatggtcctcacagggctgtgaccttggaaccaggctgcctgcccctaacgctgcttttgagatcaagaaccctgcccagtgccggcttttgtgggactaatcttccactaagcctgggaggatgtcagggaaagtgcctggcgggggtgccaggggtgggggtgcggctgggtctccacaggaggcaactgtgggctccaggaccaaggccttgctctggctatcggttgtgggccactggctggaactatttcctctctccatgttttcctcatttatatatctgaccctgagcactggtccctctggccctgccacttgtaaatcccttttatgggtctggggtttgggggacagattatggggtctggggggcccgactggccggcaccgggggagcgaaggcctggacagtgcctgagaaaggtggtggagggaggctgagtgtggaggggagacacagggttcgggaaggcagagggagaaggaaaggggagctcagagggaccgagagagggacggagggtccgagggggaggcagagggagccacggagagagggagcgagcgtcagggacggaaaaacggagcaggagagagaaggagactagaaagggccgggggcggggctgccagggactggagagcgaagcggagtcggagggagaaggagaagcagaggcagaacccggagaagcgccacacgcgcggagtttggggtggggacagagacggagagacgcagagaccgagagacgcagagagagggagagacggggtgggggagagggcggaaaagagaaaacaggcgcgagcgaggcaggccaagcggccaagtgggaggaaagagcgaggagagcgagcgacggcggcggcggctacggggagggaccctggggccgcgggcgggtcctggagggcgcgggcggcgggacccgcggacggcggggcgtggcccagggcggccaggggcaggcgggggtcccgggggcgggcggggccggggcggggagtgagggcgtgtccgcagcggagccgcccccgccccgcccccgccccgcccccgggctgcgcggcgaggctgagccgggcccgggcgccggggccgggggcggctggcgcgggcaggaagcgcctcgcggcccgggcccgccccccgcctctcgcccgctccgggctcccggctcccggccggcgctcgtcccatgcaatagccgtgccgcgcagcccgcgcacgcccggatggctcttcgcgccgcgggcggcgcaccctttagcggcccggcgccgctgccagccccccgccgttccagacgccgccgcggtgcccggtgccgctgctgttgctgctgctcctgggggcggcgcgggccggcgccctggagatccagcgtcggttcccctcgcccacgcccaccaacaacttcgccctggacggcgcggcggggaccgtgtacctggcggccgtcaaccgcctctatcagctgtcgggcgccaacctgagcctggaggccgaggcggccgtgggcccggtgcccgacagcccgctgtgtcacgctccgcagctgccgcaggcctcgtgcgagcacccgcggcgcctcacggacaactacaacaagatcctgcagctggaccccggccagggcctggtagtcgtgtgcgggtccatctaccagggcttctgccagctgcggcgccggggcaacatctcggccgtggccgtgcgcttcccgcccgccgcgccgcccgccgagcccgtcacggtgttccccagcatgctgaacgtggcggccaaccacccgaacgcgtccaccgtggggctagttctgcctcccgccgcgggcgcggggggcagccgcctgctcgtgggcgccacgtacaccggttacggcagctccttcttcccgcgcaaccgcagcctggaggaccaccgcttcgagaacacgcccgagatcgccatccgctccctggacacgcgcggcgacctggccaagctcttcaccttcgacctcaacccctccgacgacaacatcctcaagatcaagcagggcgccaaggagcagcacaagctgggcttcgtgagcgccttcctgcacccgtccgacccgccgccgggtgcacagtcctacgcgtacctggcgctcaacagcgaggcgcgcgcgggcgacaaggagagccaggcgcggagcctgctggcgcgcatctgcctgccccacggcgccggcggcgacgccaagaagctcaccgagtcctacatccagttgggcttgcagtgcgcgggcggcgcgggccgcggcgacctctacagccgcctggtgtcggtcttcccagcccgggagcggctctttgctgtcttcgagcggccccaggggtcccccgcggcccgcgctgctccggccgcactctgcgccttccgcttcgccgacgtgcgagccgccatccgagctgcgcgcaccgcctgcttcgtggaaccggcgcccgacgtggtggcggtgctcgacagcgtggtgcagggcacgggaccggcctgcgagcgcaagctcaacatccaggtacacccgggcggtggcggcggcggcggcggcggcggcggcgggggcgggggcgggggcgggcgggaaccgagcgggtcgtgagctgagtgggtcacaggtgggagcgcgcagagatccagatgtacgtggaacccaggtgtgcacgcgagaatacaggtgtcccccgaggggtactactggcgcctgtatggcccaggtgggcatgtgcagggactcaagtgagtgccggctcatgggcgcgcatacctaggcgtactgggaggggtccaagttgccacaggtacccaggtgcgcataaagcccaggtatgcacgtgagggtcacaggtgcatgctgagggcgcagtaagtgactgcatgcctgaccaaagttgtgttctggggccactgcgtgagcctgtcagagttaccattgcacgttggtgatgggtgcatgggtgtggcaggtgtgcaaggaggcacacaggtgtgcaccagggccctgcagatgtctgcatggacttgtgtgccagcaagctggggcctgaagacgcacagggcagacaggtgtactgcacagacactggtacaacgggacagggctaggtgtgcagtgggatgtgcgtggcaggggacgcaggtatttgggcatgagtcggtactctgaggaggctgcatggttggcaaacaggtgtgtgcctgaggccaacttttattcacctattctgcaaatatttcctgagcacctagtatgtaccaggtgtgggagtctggggtaaacaatagcacttgtggagtgccagctaggggcatcacatgtcacaattcccagttctcagaacaaccctctcaggtagcctctattctcatcacattttacagatgaagaaacaggcacagagaggttaagcaacttgctgaggatcacacagttgggcactagcagaggtggatttgaatccagcctgtctggcctcagcatctgtgtttttaatgcccagcctttgctgccttctggacttggatctcagagtgcgtgtgttttgggggcgtcccaggcagctggggtgggcagatgccagggccaggagaatggagggatgtgaacaggggtgttttgggggcaggagagggccgtggggctcagtggggaatgaggaggagtacaggcgggcatggggcccaggtgtctgaggctgggttgggcagtagcaaggggggccaggttgacggaatcagcatgtgtgttgacatgacaagggtgcgggaggggacttggtgtggttccctgaaaggaagttcatggcaagggattgctcctcacactggctttgggagctgggtctgttgatccccatagttcaccttgaggaatgaggccccagaatgacactggggcctttcccacaccctccacccatctgagtctggcgagcccacttcagctccactgcctgccattcccttaggaagctgcatctccatcagcaaaatgcagaactcagccttcttgtggtgacccaagccttccttggggccccaccctgtcccttctccatggctgtgacaagaatttcatgagattaaccattcctctgtgggcgggcccaacactggggctttgagaaaatgcagattccttctcccaaggtcgaggtcggtctcccacgactgcccaccatctggccggccaccctgaaagtaaaggtcacggtgggtgagcagggcagacagtccaaagggtggtggggctgcttgccctgtgccatggttggttcatccaccatctccaccccagagcttcatctcgcaggcaactgtgtttggcactgggggtctcagtggggagtcgctgaatggagagaagtgtcctgtggactgagggccttcctccagtagtttcaggccctgtgtctcggccctttggtgtaagctgatctgtgggattccttaggccagcccagggttccctccccctctggcaagaaccattctggttcccacggtccgctccctcggtgcagtgactcacccagctgaggggggctggagcttctctacctaaggggacagggcctctccagggacacagccccaggacagagtggcgaagggcctcttccccaccccaaggccacagattccggctgcggccttccttggtcaccctccctgtgttttccacacccttctcctcttcgccgtgcccgctgtgggcacaggccagtgccacttggcagtatctcccagaggtgctcaaggtccccggtctgggcctctagcatgggcaggggtgggggagggatcattattcttgctccaggctgttgccagctacgcagcgacagattcagaacctagactttgcatcaggctgcttgggttcaagtcccactttgtcacttcccagctgtgtgaccttggccaaggaacttaacctctctgggcctcagtttcttcatctgtgaagtggggacagtaaaagcaatccttatcccaaagcattgttttaaggactagatgaatcgataaatgcagctcagtgtacccagtacacagtaagcaccaagcagatggcagctcttcttgttattactctaagggacattattagcacaggtctctgcttggtcctggagagcagttgcctaatctggcttgttctgcagctgtaaacaccccaccatctcctacttctagccccagatgacacctccatagacatttactaagtccctattgtgagcccagtcccatgctgtgccctggggagccaatggcaactcactttgtttctactcttgtgggctgggcaggtgagccgaggacggatgtgtgaccaggcccttatacacagggcaatgcgtgccgcaaagggagaatgagggtggagggagcccagcggagggggcggaggagcaggaggaagccaggtgaggccggagaagaggaaaggcatccaggcaaagggagcagcctgtgcgaaggctgtgagcaggctcgagggggtctgcgtggccaggcgagtagagtgggaagcacatgacacaagggccagggaggcctggggagaccgtccttgggagtctggactttatcctggggtcctgggagccatgaagggttttagccagagaagtggagtggtctcagcaggcacctgagtctccccgctgcagaaggggaatgctcgtgaatacctgcctcttagggctgttgggggtattaaatgagatcatttatgtacctggcgcctgtttgcaatgactacaattcttctacctattattttagaaagcccctaggtagctggtgagaaggagcaatggaggagggagagtggctgagaggctgaggccgcctcccgggaatagattccttcactcagtcgcaaatatatcttgagcacttactgtgtgccaggctctgtggtaggtgccagatggcagtggggagatggggccggccttgttctctggagacatggctggcctggtctgcagcagtgctgagggcttggagggtggcaggtgggctctggacagatttgggggctgggatgcagccccagtggtggggagtgatgggatggaggagcagaaagctgcccagagtcaggctcagcaacaggatagatgttggtacccatggggtggggcatgcgatggggtacctctggggaagaggatgagtttggtctggggagaaccaggagcctagaatccttttttctcctggtcccatctggctggatttctctgtcactggcactgggtggcctgggtggggctgcacatggggcaggaccccagggccgaatgacctgcaagtggggcagctcagccaggcctttggaaacccagcctctcgctcctgcttgagggtctcatgaagaaccctgggccctggcaggaatcccttgagccgcccacaactccagagcctgggtcaggatggcctcccgacattccgggttcccagctgacaggacttgccctctgccctccaccttcttcccgagaacccaaagggagaagctgctgaagtgtgaggcgagaggcagagaacctcggtccccgcagccctcagaagtccccaaatttgtccctgattgttttcaacgtatttggggcagttaagatattttgagagaaactgagtgaagaaattagcctccattgcatgtagcttggatccctttcctcaaatcacaacctgtttggagtgcaagccagttgggaagttgttgagtgccactgatgggggaaactgaggcacagcatcacccaacaaggtggggcagactgagtctaccttccttccccaagtctttctccccaacctatgaatgaccataatatttgtatttttaaaacaaaaggaataccgacaggccaatgtcagtgcagcattttcaaggtgtctttttatagtaaaggtggaaaaaaaaccatcaggcagttttaaactggcatgcagtgggtgggtgcacgtcgtcaagaagacatttttttgcaccaatttaggggctgagatgccaggtgggggcggagggagagagagcttccaagatgggctttacatttgggtttgggctgggggctgggagtgatctcccagtgacgaagcgtgcaagcagagacacttggcaggatttaggagagggggttctaggaggattggctgagatgaccctctggcctggagaaacagatagggcttggaccaggagacatccctcccagccctgagaatgtctcgacccccaggtacatgggcatacagtccataagctgtgtgtcccagggccagtcatttaccctctctgggcctcattctttctcattataaaacaggtcttatgcctccctcctaggatgtgggtagattaaaatctcaggggtgtctctctcagcctactctggcttagggggctgcccataataaaaaataaatacataaaataaaacctcacatgcagtgcccaggaaatggcaggcacaggtattagtatcaagagggagaaaagacaccagaaaaaactggcctcagtggacaggggatgctcagaggagggagggtcagggccttggaggagatgagatcaaatagggcctgaaggcaggcaggggtgggtgagacgcctgggtgcagcaagggtgtgttgggtgctgtcccagccccagcacagagactgagatggagagaatggtctctagtgcccgggctgaggagtccagggcagcactgtcttgaaggcaagaggcctgtgggctccttggagtgaataaaaaccgtcgccgagctcgcgctctgcaggccttttataagcacctacatggttgacctcatggctgcccctcccctggtcaggcagacagtgcgtcatcatcatccccagcttacagaaggggaaactgaggccaagagaggggaagtgacttgccctggctcacacagctggggagtgagggtctggatccgcagatagaagcaggagtcctcttcctggtggctggtgagctgtgagctctccgtggtggggaattctgcagttccccctctggctgggccatagagattcaggcagggcccattgtgatagcagtgactcaggcgggctggggcatctgcagaggccaggccacatgctgggggatgggggctgacccagcttcctgaggaagtcaggggaggcaaggaacttctagttgcatttgtctgaaaatgcgatcatcagcctctggaaggagtgagcccatggccctttgggtgtgcaaatgagagatgtgggttcaatggtcagtgtgaatgatggtccacccaggagggtgagtgggggatctgtcagcgccctggatacgcccacagtgaggccttccacagccaggcaggcgcacatcgctaggtgattgcaggaccctggggccaacttcccagattcaaatcctgcctctgccccttcctagctgtggaaagtcccatccgttcttggagcctccattttcccatctataaagtgggctgagcgcagggaagactggagtggcctggcggcattcagcaagggccacgcgcatcgggcccggcagaaacgccctctgcaaagtccgattcacccgcctgtgactcccggtctccatggagattaaggaaaccagctgggttccatgtcctggttgctgccgtgaacaaagacgcgtggcgtgtactgggacaggagcgggagggcaggagccccgggagagagtggtgccttcccctacctgggcctccgttctccgaccctggagttggcccatggagtggcaaggaagccttccctctgacaccagaactgccccatcatgtcataattactgtggttgttgcttgagaactttctctgtgttagccctttgcagagcactttacatatcttttaatctccccagaacctgaatgaaatgactgttatccccagtctatggaaggggaaacagaggtccagaagggttaagcatcttgcctgaggtcacaccgtggtgtgtgactgtggtgctccaggtggagcaggcttctggctgtagcgcctgtgacccctcattcctccaaaatctttgaccgaaggggtgtgagccagagggtgtcggaaggggtgaatgggcccattttaaaggtgaggaaactgagacccagggaacttctgcgtccgccgaggcccctgtgagaagcagtgagggcctttcagggtggcctgcagagctgcccagccccagcgcccatcatggtcgcgggctggggttaggatgaccccctggtgtggactcctgctaccgggcctgtagctgtctccacccacacataccagaggccagcacctccttggtaacatcgcatgcccgtccaagctctgggtggggagctctctagagtatgtgagtatgggaggaggctcagcttgctacaggacagcccccaagagagacaaattggaccctctccaggagcccccagaatggtgagggaggaggtcatgacatcagacagatgccacacactaaccagctcatcagaggagtgcgggagggcttcctggaggaggggaggttggagcagcacttgacagatggggctggggaaggcattccaggcagagcacacgataggggcaaaggctcagagatgttggaatgtggcttgggtagcaggccgaggggaagctgagagtgtgctgggccttgcctgcaggctaaagacttggatgctgtcatgtgggctgcggggagccagcagggctttggggaaaggagagacatggctgatctggttccggaagggaccctgtggctgctggtctgtattggccctgccaggtgctggcaggatccaggggcggaggcgctcacccggagcccccactgtggctggaccaggtaactcccgagggcctctccagctctgacagccatgtggggattgccatggaaaccagccggttcccgagtggggacaagcccagaaagtctctgagtgccagccacgtggacttggatcctcactgccccccaagtacagccgttttcttctttccaaaggccatgtctgagccagggctgaaccaaacagaccgcccagacaggcatccagtggcaggggccctgctccaccctgctcggctgatactcgatgcagtcaagatctgggggccagcgccagcgggggccctccccgcctagtccaccgtcctttaccctgaaacttgataaatcatgcgctggagggggagggaagctcgcagctccattacgagtcccggcaaggccccagtggggcgttaatcatgtagcactttatgctctgatcggtaaataatgggggggggcccgcaggcagaggccttggagtggaggccaggcccaggaaagtggccaaacccccttgcctgtgcccttctccagcctctgcccgctatctttgtttgaggtgactgagctctctagaagcagccatcaccttgatgggcctcagtttccccagctcaaaacccagggtttttccagctccaagcggctgatttcctggcaaccattggtggctcccagcagagcggcgggtggggaggctgtggttaagggcggggatctggagcccgcaggcctgcgctggaggcttggatctagccattccggctgtgtgcccctgggcaaatcacttcaactctctgtgcctcagtttcctttactgtaaagcagcatcaactctttcagggtgtggtgagggttgaatgagataatacagaaagaggtctcagcacaaagcagactgcacacagctgcttgctactgtcactctaccgaactgttactatgagaaagctgcccctccccatcctggggctgggcctctgagctcggatgtgggcagctggagagagggccctgttgtcacctctgtgtccccagctcatggaatccagcccggagatgtttgcgcaaggctccaagcagccctgtcttcttggctgtgtccacagcggtcgtgcgatgactctgggaccagcggtagagtcctgctgcagagcacagcctgcggccaggcatatgggctggaccccgaggagaccaggggccggggaggagggtgtgagatcgaacctccaagtccccccagccccaggagggaactgccagtgttccctggagaggcaactatttctcggctcctggcctggagtcccttcaggggaggaagctgggagggaaactgttccagggcttggaaagactggcttcgtgctctgcccctcctgctggggggagggaagccttttccctgggccagggaagagccgctggctgcccatcccacactgtgctcctctgggacccagggggaggggagctggaaatggggccaggccgggccggaatgagaaacagcttcatgaagggggagctgggtgtctaggggctgcgtccagctaactaaacaatggctgcttgagtcagcgactgtggcggtggttcccaggcgccagggcagagcaggccgaggccagagctcccactactgtgtccttggtgagggcggtgtagcccatccagcctcggatgctttgacttcaggaagcggtggagtggcttgtccctgtcctcgggagctcccgagcctctgctccgtggtctgcatagctaattgggaacatttattgagcacctacagtgcttagcactgaaggctcctatgagctcagtccttccataagccctaggtggtgggtgctattgctgtcttattttacagatgtggagtccgaggttcagaggggatggtgcctcccatagtgaggtaagagctgtgagacttaggagtcaggagcctcagctttctcatctgtaaaatgggtacgcagcaagtgtgtgtgtgtgtgtgtgtgtgtgtgtgtgtgcgtgcgtgcacccccagggctgtaaggtgcccccagtagctgtagtgtcacacagtaggtccttaatccagccaggcttgtgacctaagcctggggcttgtccttccaggccatgcctgtttggggtgggtgggcagatcatgcccagtctgtgtgttggccctcagggcggcctggctggctggcttcagcccttccagatggtgtccagctggtctggataacctcaaagccctggagctgggtgacccgcctcttccagaggggtcagggaaaccaaggcaggcctccccgaagggtctgccagagctgctgtgtcctttgccgtttgtctgaagcctctgctcttctctgtgccttggtttctccaacgtgctcctccaggctgcttttcctctgtggctaaggccaggcttcctgaccatggtgctaggcctggttggccatcttctccctacagcccctccaggaagcctcttggtcacccctgaaggcgctggtatttactttctcagcagcaggtggtctcctccctggcatgggggctgctgccagaggccacccaggaccgagtccgtcctgccccctcccagggctggcacacagtgtgcccatggctcattccttgcctcagtttactctcagcagaggtgtcagcttgcacagtgttctgagaggcggtgcatgctgaagtggaaggagctggggtctgggagtcacaggtgtggcttcataccctggcctggctgtgtgcggctgggctgctggactgagactggacacagtccacaggccaccactgagcccgtgccacatgggctccactcaggggagcccaggaggactggccctacctacctgggctgtccaagctgagggaggagttggcggggacgggggctgagagaggccacagaggtcagggccagattgagtggggcttcaagggcccaggagcaaagtttgggtttgtgttgacagcactagggaaccatgggaagctgttgagctgcacaggagatgtgacctgctttgcggggttttttttttttacaaaataaactttttactttggaataattttagattttcaggaaagttacaaagatagtacagacagttcctgtatacccgtcccctagtttctcccattgctaacatcttaccgttaccgtggtacatttgtcaaaactaagaagccaacatttgttctttactcccaactaaactccagactgcactccacaaacgtctgctttcttttccaggagcccacgttgcattaagcgctttgcagttttaaaagctctctttggctcccgtgaaggatgaatgggaaggagcccagctttgggaggagctggggggtccagacagcccagtccccggccaggatgtagtgagctgcggtcaccttgcagtttttttatttttattttttcgagacagggtctctgtcacccagactggagtgcggtggtgaaattatagctcactgcagccttgacctccaggcttcaggcgatccttccacgtccacctcccaaagcgctgggattacaggcgtgagccatggtgcgaacggcccaccctgcagtcttaataccccaaagtgatcatgtgctttcagctctgtggcaaatttcagctctgtggcaaggaaacctgactttcccaggatcataaacaatcaaacacttcaggcaggaaggtgccctcacttctcaagtgcaaagcctccgcagccggtgtggtagccatgcagtctgtacctgtgacggaaccgctggattttgcaacctgccgcagcgcccactgttaatgccgcatccttttcatagtgccacctgcggtgggtctgcggcaggatgtgaggcctgagaagccgggctcttgaagcgctccttccaactggcttcctggggagagaaagtcaacacaattacagctggtagtaaaatcaatatgtcagagttttaatgggagagtgggcagagctgagctttggccccaggagggagccagctggagggggagggggcatcctgctctcaaaacggggccgaaaccagcggcggttgctcatcccatgtgagagagggataaagtgaggtttttacaggaactgaagctagcagccagtgttgcctgggcctgaatacccgcctccctttgttgccacacgcagagtaggcatacgtttccctcagttctccagcacccagcatggccgtgttgctctcagtcactcgacttagagagaaagcagctgaccacagtcgttcacactttagtcaaaattaggttcctttcttttgtaaacattccctccagagcacaggctccatgctggagaacgtcatgcatgtgctgccatgggaaatgtgtgaccagcacagtgccatcacaggagttggggggctgagccacatcttgaaaacttgccgtctgggcatgcctggagagggaacagcatgggtccagacaccgggggcgctgaagtgccaaggggagtacgaatgcctcagaggcatgggatgggcattggctgctgaagggacatttacaatggtacaagagccccgggtatgaggtgtgggcacattccaggacctgtggagactgatgtggtgggcgcagcgggtggggcagagggaggagggagactggaggcctgggagctggcaggagctggggcacgaaggccttgaatgcgaggctggactgctggggcttgatcccgaggacagccgggagctgggttgtaggtagggagggtctgaccagctttgtgtgagagaaagatggccctgtgacttggagggcgctgcggggatagccgagccttccctgctctcaggagaacttgagttttgaaagactcatgctcattagcctttaaggaggacggtgctggggtcagggggtattttgggcctgtgaggctaactgtccctggagaccaagttcagccgaggccagcatgctcaggacgtctagtccccgagtcccgtgtccccctcccccagcctgcatccccctcccccagcaggggcggcacttcccgccacgctgggcttccgtgtttgagccggtttgccttgtgatttcccctggcagctggggaatcagcttccccctcggaacacagatcattcggagcagccgacggcttacttctttaaaaaaattttttaaaattttattttaggataaggggaaaaaacgctgggggaaaggccttttagaaaattccttcggtgcagaattaatggcttgtgaaagtcagcgcggggtgggggaggggggagcgggctcccagcgagctcccctccctcctgctcccctcctccctgctgccctagcccacagatcaccccgagctgggcgcctggtccgccttttcccaggaccccaccctggctggatgtcagggtatgcccaaaggtgtcatctggggcctcccaggtgtccccttccagaacttatgttcccttggtgggagggattcacaattttaattttaaacaacttatttttaaatgatgcaagtaattcatattcagtgaaaaaagttacttagttacctagcccctaggaaaatcatccctcgcagtggtgaggatcccacctcacctcttccctgcagctgcaggattgctgaggggtgggaccccgcctggttggggcagctggggagaccgctcagcacccaccttccagggctgtccccaactgtaacacacacaggatggagtcgggtaggtcagggctggcactgagaggaggtgccaatgatgcagctctcgggtgggggggaatggcttcctgggcagagggagcggccaggccagaggtcctgaggcaggaacgagcttgtgatatttgaggcacagaaatgaggccagtgtggctggggtgaaggagcaagggcaagggaggtgtgaaatggagttagaagatgaggggacccacgggaggatttaggattcaggatttattctgagtgtcctggaaaccatgggagggcttgaatcgggggagacctgctttacatttttaaagggctcatttggcagctgtgttagcagataggaaatgtcagtgtagggggcaagagtggtcttggaaaatgaagagggctgggagggctgtccaggtgagaggatggctgctcaaaagctttaaggtaggcatgatttgccctgaattttctttctttcttttttgatcagcagttgaacatgggtaacttttacttcataataataacataagcagcagtcatgtctgaaacacaatagtatcggctaacacttcctggacacttactgtgggccaggtactgtatgaacactttaacctgctccgtttccgacctgggccagttcacccctccttaggcaacctggtggtcccccgctcccgggaggtcaccatattgatgctgaacttagtgtggacacccgatcagcatagcacactacagcctagaactcctggactcaagtgatcctccagcctcagcctcccaagtagctgggaactacaggcacgtgccaccacgcccggcgtttgggaacactttaaaacaaatgattcatcccagcctctatgcggaaaacactatggatatacccattttatagttgagtaaaatgaggctcagaggcgaagtgccttgcctgggtcacccgccgtcatcctccggaagaccattccctcctgtatgttggtccagggcatccccagcccatcacacctctgggctcagggcttggcccccagggacatgctggaaacagccccagcctagaagcccatccggccgtaactgtgtttatttgcccaagcacagaaggacccactatttattgctttcttttgaaaactagctgagcctttgtgcaaaaaccaggcaggcacatcatcagtggcttaagcttgcaaaaagcacagacaagaaatttaaaaagaaaaatctttaaagctttgccctaaagatggttccaatgctgccttccggtgacctccctgagtcctgctctgagcctctgatgtccaaatgcagctgaggcatgggctcaagtctgctacctgggtcagccctgggggcgtgacattgtagttagccattttcccctctgagcctcagtttccccatctgtgagataggacccctagggctgccaggattctgggagtcagtgcactggcctggtacagtgtcagttcccagtaaatgtggcctgttattatgtttactgttgtgactatttattgtttatgcaccagttttaccaaaatgggcccatgacatcctgtgacttttcttgtaatcagtgtgggcttatggcgtcactgcgggatgggggctgctctcctggatgataagccatgatggacgcactcagtcccatccgacacatgtgtgtgtccccttttcactcctctgcaccacccttgtgcctgcgtctttgcggagttgcacagttattgtctcagggtcacttcctggaggcctgttttctatttttgtgcaaattgcaccaggaacctttgaacataccaagacccaggagaagggagggaaggtaggagcaagttcagggaacagcccggacatgggatcacctctcacagctgccctgtgagccgcagctgatttgctgctggagggcatgggtgatgctgggctgttgtggacatgggactgtgcattcagacacacccagcctgtttgtccccctgtaatgtgggcagatgaggggataggtgcttggggagggaaagaaaggctgcggtttagggaggcctccacctggagtcttgcaagctgctggggctttggggtggtggtcctagggtcagagcagacacccggcaggaggaaagcccatggttgctgtggagacgcagagccagccggggctgtaggaaaacagccgaggcaagagggacacctcttgggtgccagcgggttaagctgaggctgacggtggcctccggtcatctggtgtggactcctctgctcttcccagctgtgcccggccaggaggggcagccccaagggggtgcgggtgtagctctcaccctggccggcctccctggactctttaaaatcaaacctgaccttgttccctcgcctgctggttcccgtgtaccttgaacatcatctccttggaacagctctgtaaccaacactgaggtcagggcaggcctgggcttggggatggggtcccgtttgtgtttgggcctcagctgagcactgaggatataaagtaggaacaagacttgaaagctctgatgccagggcctgagatcccagccagctgtgcgggcggggagccggagaaggttctggagctgggatctgacgtgccgttcctcttccagctccagccagagcagctggactgtggagctgctcacctgcagcacccgctgtccatcctgcagcccctgaaggccacgcccgtgttccgcgccccgggcctcacctccgtggccgtggccagcgtcaacaactacacagcggtcttcctgggcacggtcaacgggaggcttctcaaggtaggtatggttggggatgtggggagggggtgggggtgggaggctcccctgggagttggctgagggggtcagtctgtacacagggctgctacaggtccagcctgaccctttgttttctcccattcgcctagcactttacagtttacaaagtattttgcaagtctgtttttgccactattgctcataatataggtggcgtccgtacagaggagggaaaccagggctcagagagggtgattctctcagaggctctaggactggggctttgaaactgtatggctctgagttcaaatgtctgggctctgccatttgctggccctttgaccttgggcaacacatattctctctccaggcctcagtttccctgtcaagggctgtaagctgttgtggggctttggcagggtaaggccatggcctggtgagcaggaatgctcattcatttctcctccccagccctgccagccaccccgtcccagggtgactggtgtctagagttaactgtaccccagcccgtggccccgagattcctggagctgggaggagatgcgcagaatccagtttccctgctctggggcaggacagacatggcggagcctgggccagacccccaggtgcagccctggacctgcccccaacccagccatctctcctgctccctcttgggagactaagctaagcgccaccactctattcatgcaccaggcccggcctaactgctcagatctgatcacccaagtcccccccaacccactgcctgggcagacgctgtgggctgggtgggcgtggggagtggagtcccaggaccccaccgctgtggctggggagaggaaaaatgtggggctcgtcaatggggctcgtggtttggggtcagatactcacattcggagtctggctctgctgcttccagcttggtgacttggggccagtttcttctcccctgcgagcctcagtgtcctggcttgggaacatgagccaggcccctcccccacccccgacacccatgaggctgcagttgttaggcgcctactgtctacccagagcctaaagggcatcctctcacttaattctcacacccctgcaagggaggcagaggcacgattctcatgccacagatgagaacgttgaggctctgagaggggaaatgattgccccagagtcgcacagcaggagctggcccacagcccacaccccgccacagcctggagcccctcacctaccaccctgcacagtgtggcctctgtctccagccaaccctgccctgctcgggccttaaatcgccacacccagcacaggccctggggcacagtagttgctcaataaatgattgaaggagtggaaatgacttgagtgtccactggacgcctggacataggggtgggtgcgggcagtggcctgagcccctgcaaggctccgccaagaggccacgtgggacaggagtgtctcaggctgggacaaagcccatggaagcctggggagaaggtaattttgagttggtgtgtagaggcttctgggcctcatgtgtgcattggtagaaggggaacaggaaggaatattccagaggagagcacagcataggcaaatgcctggaggctggaatgtgtgagcagggttgagggggtggagataaagctggggttgtccgggttagatcaccaggaccttgagtgccagaacaggttcattccataagcagaagggagccatgaagggtttgggagccccaggaggaaggctggggcagaaactggcctgggaggtgtccggaccactggccccatctcaaaatgcccagcctggggcctggcagggcccagacaagacaacacactgggaacaggcagggccaggcaaaaaagagcagagtttggtggggctctgaccggtattgtcatcctcaggaggacacgcagagggtccctcagagccagagaagcttccaggccccagataatcctggtcttcctcctccctgcaccttggttccacacccctagccttaagccttggactgtggggtcaggcaggcctggtattgcattgtagccttgtgatctcttcactttgtgcctcttgccaactccctcggccgctcccagcctcagattcctcttcggtgaaatgggcgtcggggggaggaatgagacgtgcagcctagcagcttccccgggcctgaccccatcagcctggcctgtgtcttatttaatgctcatggcccgcctgccccattagctcaggaaacaggctcagagaggggaggcagcttgtacaacttacacattgtagagctcctcagtgtcaaagccagaatccaaacccaagcccctgcccttagccatggtgcctaacagcctcccagagcacgtttcgtaaactacaaagcctgcacacgttcacagggcgggatgccttggagacgagcccagaaggagctcctggtgggggcacagcagaggcagaagcatcaaggcccggccctgtgccctcccctgcacgcccgtgacttcccacccctcctgaagggtccaagacaggatggggaggcagagcccccagacccgggctcaggttgtcccctgggtttggcctcccctgctatgggctccagcaccctgatgcccactacccccacagatcaacctgaacgagagcatgcaggtggtgagcaggcgggtggtgactgtggcctatggggagcccgtgcaccatgtcatgcagtttgacccagcagactccggttacctttacctgatgacgtcccaccaggtgaggccagagccccagcccaacgccatcccagcaccagccgagccctcttgcttgcctggcctttacacacgctgttcctctgctgggagcaccctcctcctccatctcccttatctgctaactccaccttgtcctgcgcctcccaacaccgaccttgcctctgcagggaagccttgtctcccatgttcccccattagagtgttgaccctcagtttccccagcctctcatggcccgcaccatgctgaccgtaccacctccccaagggagaggctggcagtcccattgagctgggcccccacctctgcccccagatggccagggtgaaggtcgccgcctgcaacgtgcactccacctgtggggactgcgtgggtgcggcggacgcctactgcggctggtgtgccctggagacgcggtgaggctggacaccagcaacagctggaccaggagggctgtgggggtgggaggagctgacctgggtcctgaccctgcggtgccaccccaggtgcaccttgcagcaggactgcaccaattccagccagcagcatttctggaccagtgccagcgagggccccagccgctgtcctgccatgaccgtcctgccttccgagatcgatgtgcgccaggagtacccagtgagtcctgggggaggcaagacccagctcgggacacaggggagcctcccttcacccagcacccaggccccgagaggtggagactcccacccatggtgccccaaggacctgaagacaaataatgagaacagtgacaatgactgggctttcctgaccaactagtaagtgccaggcacgtgctctgtgcttgacgtccacctccgttaggccttacacaccctatgaagcagatgcttttgacatcctcattttacagatggggaaactgaggcaccaagtggtgaaacgacttgctgcaggtcgcacagctagggagtggtagagctggaatctaaactcaagaggcgggttctagagacccaggagggagggtacaagttggaggcttggaggacagtgagttccacccaccttttcccagaacaggggatggagggagggaccaccaggtgccagactgaaatttctccttctcagaaacagataaacctgcaatgcagggggctgggtctcccccggcttgtgccaggagggctctggcaggcagccttggcggtgggggattctgggccccggcaaggggtgggagccgagggtcagacaggcctggggttcatgcatctggctctcagtgacttctctgaggatgagggtcctcttctctcaccctggggggctctgacagcccggctctggcctgtagctgctcagcatctggggctcctctgccctgccctgccgttatcacacatcacagagtccttccctcattcattcagtcatttcatttattggacaaatattatggaacacgtactatgtgccaagcacagttctggactctggggacacatcagtaatcaagacagacccctggccccaggctcatgggggaggagaataggcaagataaaacctgaaggtgatgctaagtactgtggagaaaatgaaagcagaacaggggtggggagcgggttgtgggtgcagacatctcaggccaggtcaggtaagatatgcaggaggggagccagggtgagcatctggaaagagcgtctgggtggagggaactgccagtgcaaaggccctgaggtagaaacaagatcagctgtttcggagagtattaggggatggggtcagaggtcacaggggccagatcatgcagagccttcttgaccactgtaagatgatgtttcattttgcagctggggaaactgaggctcagagggtcacatgtagggcatagccctctggccctgagtcctggccaccactaccccttcccccaggggacattcaggcagtgccagaccttgggttggtgcacagccctggggcaggctgtgaggagcatagcctggacccccagagctgagggctccttgcccccagggcatgatcctgcagatctcgggcagcctgcccagcctcagtggcatggagatggcctgtgactatgggaacaacatccgcactgtggctcgggtcccaggccctgcctttggtcaccagattgcctactgcaacctcctgccgagggaccagtttccgcccttcccccccaaccagggtaagcacgctgtgctgttggcacagccccggaggggcagaacggtggactgtcaggcatggggatggcagggggccagaggtcacagcttctgatgttggtggcaatcccctgcccccatgtcctcccctggctcccccatccattccagaccacgtgactgttgagatgtctgtgagggtcaatgggcggaacatcgtcaaggccaatttcaccatctacgactgcagccgcactgcacaagtgtacccccacacagcgtgagtggcttgggtggcttgcctccagttggtggagggaggaacgcatccccgggaagggtctttgctttcagggggccctgagaagaaaaatcatagcatcgtagaggtagacaggcccttcagttgttcattcaccagcacatttattcattctacaataaatgcatactgcctgatgcctggcctctgtggacagccaggtgggacggggcaaagtgctttgattatactcagtttagtcttctaaaggccctgtctcttttaactcctatttgtatacctcttgttagcaggcagctcactaccttaaagacccaatctttcccaggcagccccgatgatgagaaagacctttccctgtgctgggatctgccttttgggttctagttcctgggacagggatgagttgaggggtggggaaccaggagttgaggggcctccttgtcttccagctgtaccagctgcctgtcggcacagtggccctgtttctggtgcagccagcagcactcctgtgtttccaaccagtctcggtgcgaggcctcaccaaaccccacggtaagccaggctagggggcccctccgcctctgctgtttcattaccttttttaaaaaattcacatgttgagaatgtttcaatgcctttgcatattccgccttagctttggctttgacagctatatggggctcatcacataccacggtgcgtttaacccatgccctatagttggacatactaattatttcctcttttttgcattttgatatagccagggcactatgcatatccttgatgattccctgaagaccgcttcttagaaatgacctgttgggctggtagtgtggccatagttctacaccttgagctcagctgccttccagaaagcctgagccagtttatacccccactgcagtaggaagaccatttcaacaaccctaggtgttcagggcatttgtcctcaaggcctgtggaggtgattcgcttaaggtcatcgactcaggcagtaccagacttgggccttaacccaagtccctctgcccctggagcccatattctcccctcctgtgaaaatcaggaactgggtggaaagggccctgcctgggtttctgcacgagcagtggcgtcccaagggtgggtggtgctgcagctgtccctggacagggaggatgggctggcctcagaaaccacacgctcccaggtcctcatgtcagtccctaggaccctgcagtctgactccatgcttgtcaggggccaggcctgccccagcactgcatggtggttgggtttaatcaactaaatggggtgggagcaagaggaggaaatgtaaaaatggatcaatctaggctttttagtgtaaagataaagtaaaaatggacatgccacatacctcgcccctggttggtttctgagacttgttcactttccaggtggcctctcacctttgcccaggaagcctctaaggccaccgcagcccgtgccaggatggccaaatgggatgcctgggaccttggctggggtgataaggcctagccaggtgggatgtgccagggtcctgagatcacagctcgtcccctctcagacctggcgcgtatcagggctgtgggtggctggggtagggcaccagccttcctgcagctcatctctccaggcaaaggctggtcctgcccatattccagatggcacaactgagataaccagcatggcacctggtgccctggctccctgcagaaggtcactggggcccctttctgggcacacatcccggggaagcagccccagcgcccagagcctctgcagccccagcctttttgcactgagctcagagaatcttctcaggaatccctgaagccctgtctaccccggcagttgctaaggagggggccccatggcctcagcctggaatcccctgctcgctcgcagtgcgcagcacctcccacctgagccccataactgctttgaagaagagcctggcaggggccatgcttaattctattcgaagaggggcttggcagcagggggcttccagcactggaggagagcccagtggagtcggtgcagtgaaaccatacgggagccctgagctgctcctggacccccagattccacagttgggaccccactaggactcctgctcctgtctggggaccccatctcaatcacgtctcttccttccagctcccagcccagggttgtgtacacagcaggggctcggttatggtggtgggaagcatcacactgggcagcagcctgcttcttgtgcgctaacctaggggatgcgaggaggacccagcctcgtcacagtccgttcagcatttattgagtgcctgctgtatgccttagtcagtactgggccctgggaaagaaccgagttggactagtcctgccatcacgagccaagagcctcaggtgtgagctgtggctgtatgatcttagggaagctactgaatctctctgtgcctctgtttccccatctataaaatgggacctgcctgaagggtttggtggggatctggaattatgcccgtaagataccaactctatacttggcacatagtagatgctcactacaaagccaccatgcaccttgggaactgatggccactctctgtgggtgggccagagtgaggatttcagagagaggatttcagagagaggatttctcttgagaggggaccttcgtgctgggtcttgagagatgcataggagctcaccagctgggagggagttccatggcagcgtcctgtcagatggctgtcccccaggtctgcagttcttcaggccaggagctggggtggaggcacagaggaagcctgtctgagaattacagtaactagccgaagaggcagctctgccccgggcgtgcaggaggctctgaactgatgtttaatttggcatttaatgaagtgccagttagtcgtagtggtgccgtggtctctgtgtgaacagcaggcagcaggcagcgggatctgcacaccacgtggcccctcgggagccgggagaagtgtccctgggaagggaggtgctagggcctgagtctcctgtcacgttcccattgtccctcatggtccccgcgtgaaagatgtgcgaagtggaggatgctggaaggagggcttcagctttaggggaggctgggaggaaggtggatgtgtgccccgtttgcaggtgcctgagggatgaggtagcttccctgggggtggcttcccaaggaccactcataggtgtaggtggtcactacgggccagtggagagagtggggtggtaggaacatgggggcaattgtgggggtccctgggggtacagagacgtagggagggaccaggtggattcagggtccctgggttgttgagtgccttgatggtttgggacaccagttcttcccctggagtttaggagaggccctgtgagagccgcgaggactcctccagcctcggttctctagaatgggggtgagcatccacctggccacaggttacaagtggctaaggggagtggggtggccctcggggatggtcacacatcattcactgtgggggccctcttgtgagagcgcctcctgccctgactctcacacctcagccccacatcaacacctacccaccgggtgggctggggccaggaggacagaggctgggccccagccagccgcaaagcagacctggcagtggcttcgaggcctgagtggaaacatggattccatgccctcggattccgtggggtttacacacagcacaggatggcagcctgcggtctgcagggggcccgccgctgactccgtctgggcccctccttggtaggaacacggaggcccggagagggtcagtggctcgtgtattctggcacagggagccagcagcacccgggcctggctatgctgcttctcttgccaagcccctgaggtctgcaccagaccctgtccctaggggaactcaccactctggtctcgtggtcagcaaatggtctggacaactggagcattcctgtgttgctcattccactgtaggcaaactgctttgcttctgtgtgcctcagtttcctattctgtaaagtgggtgtaatgatagtatctacctcctagggttgttgggagtagaatttggtaaattaaaagagtgcaaagtgctcagaacggtcccagcagagggagggctagatgagctggtgactgccactgttattagcattatcgtcatcagttcttgttgttggcattggcatcccctcgaggtccggttttgggctggggtccctgaggggaatcagtccctgtcctgctctcatctggtgtagaataaagaagcgtctcatattttgtcccaaggcctttggcctggctgggtgacctcacgtggacacacgtggcccatggacgcttttgctttctggcctgattctaacccagatccttctgcaaccagccttgggaaggagggcagagtaggaagtccctgagctgaagggtggttgtagtccccttggcatgggtgtggctgctccaaggtccccagtcctgccctgctcatggtcccagcaggtcagattcgggagcaggaggaggcaggaatggctcactggggccaccaaagctggagaacacagggcaggttggggggtccatacctcccagctcagagcgatcactaaggtggacatggcgggaacagccctgcctctggtctctgcccctcccccaggcctcagtttcttattctgtacagtggagcatggatcccaggagcctggagacagcagttcccaaccaggccttgaatccctgcagcggggctagacctctgcatcttaacacgcgccccagctcggaggaccccagagtcaagacacctggggcttcaggggccagccctgtcctccgccctcaggcagctcactgctcttggaggctcaatctcccctccctcccttccatccttcatccctccttccttctttccttccctccctcctccctccttctttcgttccatgaagcagctgctctgccaggcctcagtgactccaccaccaaacaagagccaaccatgtgctgtccccccatgagcccggggcccttcctgggagtatctggggctggcaccttcacctagaggctgtgacttatacccgggctgtggggaggggtgtcccctggagaccggtggtatctggccctctgaaatgtcctcctggtattcagagccctccctgtgcctttcctatgggctgtttggaagcccaaggtttctcttttctgaatcgcttaacacgggtcagtcaggaagctggagtttcagccctgggggcatctcagggagtgggtgcagcccccctgttctactattgggaaaggtgaggcccagagacagggaggagctgggcctggagttcagcctcccagcctcgtctgaggccagggagcactcatggaggaaattggccccaccactgggcgggttatgccatctgcctgtgcccaccttcctcatctttaaacagggccaatgcgacctgcccataggatggagggtggtggcgagtgggaggcacggggtggggctggtggccgttaggactgaatgactagtgttttctcctcaggaaggcaggactgaaccaggcaggctggggtgcagtgagtcctcctgcctcttctctgaaatgcccctgtgtcaccctctccttctgtttcctctgcagagccctcaggactgcccccggaccctgctctcacccctggcacccgtgcctacgggtggctcccagaacatcctggtgcctctggccaacactgcctttttccaggtaagtagaagccaggccagcgccgggtggggccaggaggaggccggggagcacgcaggccactaactgcccccatgtcctggtgtgacccctgctctgggcccactgcagtgctttcgcacctgtgtgggctttgcttttctttctctgagtttccacgttctgcatgaggaagccccactctgactgcacggggctgcaagaagaggaagtggtgagggccaggccaagggggacagctgggggccaacagctgccaagggaaagccagtgcccccaggctctcctgccccgtgccacagccggagggtggacgctgccctatcctgtcctcccttagcctgagctgtgaccctggacacacccacccaccgccgagcccactgccccgtgggtggcttccatgtcttccctgcagaatgaccagagaaccccttggccaccccattccccattgtccagatggggaagatgaggcccaggaaggaaaagtagatgacgccagatcacacaacacagggctggacttgtgcttagctctggactccccaaccagtgctcgtctttgcaactagccccgcccccaccatctgggctgggggttggggacgcagctcctttctggacccctcctggaggcgcgtcctgggtgggaagcgttgacgagtcctggaggcgtgccagccacccccctccccacctccctggaactcgccatctgttacttccatggaggagctgaggcccgtgagagctgtcacacgtggtggccacgtgccgggcatctgggatgtgtcgggaagcctcgtggcaggggctggagctctgggagggctagggtggggcctgccctcagccctcaagccccaccctgcaggagttggggcaagcgcctccaggatcagccagggggctgggtgggtgggcaggatggctctgcccctgggccgtgggcgcctgggatggggaggtgtgagcctgacttgagtcctgccgattcttcccagctgtgtggtggggcagcctccactctgaccgagctgcaggggcgcctgccctcctgctccccagggcctgctcctagaacactgaagtcaggcccagcggtgggggcctgtttgctgagcctacaccctggggagctctgggacgggccgggtgtgctgttctgaggtggctgaggactaagaggagggacccatctccagctcagcatggcaggggacaaaacgggcttttggccccgtcagcagccactttcctgtgttagcttccgggctgggaccccagaagcagggaggttgacctgcattctcctcagggtgtcacatctgccagccacagggacataaacaggaagctctgccacgcagctggctgggtgcttggcgtaatacacaaaacctgagtctgtttactcagcaaatatgtattggtgctgctcctgagaaggccagatgagcctggggaactgagcctcatgacacaaacattattggatacctcctgcatactaatgatagcaagcacatattaggcccctaccgtgtgcggccccttgaggtacacaatctccagttttcccagcaaccctattcccattgtccaggtaggaaaaccaagcctcagagaaggggtcaacttgcatgaggtcacatagctgggacatgcagaggtggggtttgaacccaggccagggctcttccagctgctttctgctgcccttgggggtggtgtcagagcggccgagccctgaccgtccccggttggcgaggggacaggtaagcagccaggcaagaggctaagggtgatgcctggcacacagggatgggggcagctctaggagcttcgtagtgccccagcagacacctgaatagttgctgctgagggaatgaatgaggatcaagtgaggcacacccctttgatttgagggcagcatctgggaaggcttcagaacagggggcttttaagctggatcctgaaggctgtgttgagctttgctgggtggtagaaaggaagacaggtgttcaggcgaggggagggctcaggcaaaggccggggcaggagagtctggccgtgttgggcgttggggcacgtctgagcagggcctggtagggcaggatgggaggtgggaaggctcgaagagcaggggaaccccgctgggagtggagccttaggagctgaatacaaggcccctgggttagatcactggggatgctggagaggcttttagtggtgctgagcgcatgaggccaaagttcttggcattcctgcactgcttgcctccctcaaacattggacgtgatggccaggaaggggattttgggggacgggacagcccatgcaaaggcctgacagttcgaccaagcccacctttcccagcaggagcccgtggtgtcctgctggagttagagggcaatgcatgctggcttggttctcctcaaacccgcctcccactccctgtttcccacagggtgcagccctggagtgtagttttgggctggaggagatcttcgaggctgtgtgggtgaatgagtctgttgtacgctgtgaccaggtggtggtgagtggggtgactccagcatgggcggagggcgggcctgcgttaagtccagatgctgtacccctcaccccaccctgcctctctctaccttctggttcccccatccccagcagccccaacttcatctgcctccatgacacccatccccagcagagccccaggcattgcccatgccccctatgctcttttctgcccttttgcagctgcacacgacccggaagagccaggtgttcccgctcagcctccaactaaaggggcggccagcccgattcctggacagccctgagcccatgacaggtgggcacccccacccgccccacatggcctcggggcctcagtgcagtgggtggggctcagccttgtgcgactcattccagtggttgccccaaagccgcagatgtcccaccccattgttctccagcacacacacagcctcatatcccagccctgccatgccatgccaggctccaggccttggggtctccgtgcatagtttcccctgccttcctgggcctgatcgtccccataggaaacaggacacagtccctctgcagagcttgtaaggacctgatgagccagggctcgcccaaccttgagcgtggcatctggggtgtggtcagctcccctcgcgtggcagctgtgcagttgctgtgactgtctgtgttgggtccactctccaggggctcctctgttcatggggagtctcaggcatccctggtggacgtggtgccctccagattcccaccatgaaggtcccagaacggccctgcatacccaaggtcctggagaaccctccctgccctcctctttgggctacttggagggtttgaagccccaaagtactcatagtccacattactcagggatccccagcatcctagggccccgccggggttgatcagacccactgaggtctgggtgggatctggctttaccacccacaggcctcgtgagctcaggcgagtccctcctgtctgagcgtcagcctcttctctgtaaagtgaggctgacctgaggctcccagctggagtctctgtgaggggaaggaaatcaatgaagcaggggctgcactgtgctcagcacaggccccaggggtttggggaaggggctaagaacctcaggggatcctgacccccagaatcaggacttcctctgggtggggcaccacaatgatggggcgcagacctcttgacagttgttgtgtgtggagggcacagcggtgttggggcatgcaccgcagagcggggctgaccgagctgccccgtgtctccccagtcatggtctataactgtgccatgggcagccccgactgttcccagtgcctgggccgcgaagacctgggtcacctgtgcatgtggagtgatggctgccgcctgcgggggcctctgcagcccatggctggcacctgccccgcccccgagatccgcgcggtaagcatgcccagtggaggcacgtggcacccgcactccggcacggcgcatgcgcagtgccctcgagggtccgacttcttggggacccaaacggcacatacaccgacacatgggtgcagtatcacctgtgaacaaaaggaagtgctctgcctcacagagctgatgtttcagtgggggaggtggacagtaataaataaggaaatgaataaattatagaaggcattggaagtgtggcgtggaggagacaccgagggctgaatgttgttagtttcaggggataccatgatcactaaagccaccaatgacatggccaaacattgctcctggaagctgacctcagcatcctccaggagaccccctaagtagcgtccccaggcccacgtgggctcagtaatgcacacccacatcctccttgccagcacagtgacctgccaagtggccacagtcccagccccacctgagcctccagaccttcctctaagcagtgggtctgcacggctgtgccctgctgggtgcctgtgactgtgggcagaagcctgctggcctgcagcctcagatcccattcgcccctctctcgggtcacctggcagattgagcccctgagtggcccgttggacggtgggaccctgctgaccatccgaggaaggaacctgggccggcggctcagtgacgtggcccacggcgtgtggattggtggtgtggcctgtgagccactgcctgacagatacacggtgtcggaggagtgagtagccacggtgcccccacctaccttctccagcagtgccagcctctgctctgtcctcctcactcctccctccccatcctctgtcctcactctgctgctttctggaagactgttgcttcgtggcctccaggcctgtgccgaagccattcccaccacacatcctgccgtttctgcttggggcatctgctttatccctccagctctggctctgatgcccactcctctgggaagccctcacaggctgccctagcacagcccttcttccacctaagccttgctctgaggaaaatcatttgcaattaaaaaggctggggctactggcatggtttagagatctgtgactggcccagaggggccgtaggaaatacgcgtgagcagagactgaactggctttccttttgggaggccgtgcatcaggcgtgtggaagagccgtcatctaccagcccagcagacgttctcatgatcagagacccttttgtcccacccccgtgtcttatagttgcagaactgtgggaaactgatggggtaaattatacatagaaggcattggaagtgtggcatggcgtggaatggggcgatccctgagcctggctctagggtggccgtgggggccaaggaccgctggctgaccacagcacctcccctcaggatcgtgtgtgtcacagggccagccccaggaccactctcaggtgtggtgaccgtgaacgcctctaaggagggcaagtcccgggaccgcttctcctacgtggtaagggggggctgcagcccactgtccggcccgcccagcacgcacactcccgggggctggcccgaggcccaaacgcctgccttcctcccacagctgcccctggtccactccctggagcctaccatgggccccaaggccgggggcaccaggatcaccatccatgggaatgacctccatgtaggctccgagctccaggtcctggtgaacgacacagacccctgcacggagctgatgtaagcctctgggcctggcccatcccttccagcccagagaaatcaatgggcttgggggctggcgggctggaggtgacatccttgagccaagcctctcttgggtcttcattggctgtgtcccctaagccaagccccttctcctctctgagcctcagtttcctcagctggtaagaatagtaccagtaattggaagaagggctttgtgccaggtatacagtagttgctccataagtgatagctgtaatgagaatggtgttgattgcacacacacagatcttctggctggcccaggggtgtggtgagtggcaggggtgtggttggagtctgttggcgaaacacctttgtctttattatgcacttattgtgtaccagaccccactaatgggcattgctgggacaccaagaggagcacaacatagacctcaagggaagggcagacatacccacgggaagtaggaacatccagtggggctaggattgggagaaaagtcagtgccttcagggatctggggagagagacttcaccagggttggaggcgggagagaagacctgggaaggcttcctggaggaggtgggatggggcggaatttggaagtgtaaggaaacagctgggcactaactgggcagaagatgagttgggaccagtcaaggaggccttgaaccccaggccaagtgcgtggacttgtgccccaggtctcaggggcattggcggtgggtgagcagcagaaggcaggccctgctgataacctgctgctccccccaggcgcacagataccagcatcgcctgcaccatgcctgagggggccctgccggctccggtgcctgtgtgtgtgcgcttcgagcgtcggggctgcgtgcacggcaacctcaccttctggtacatgcagaacccggtcatcacggccatcagtccccgccgcagccctgtcaggtgagactggcaccccgcccttcccccaggctctctggggctgcaggtgcactgataggttttgctgtcccccgcagtggcggcaggaccatcacagtggctggtgagcgtttccacatggtgcagaatgtgtccatggccgtccaccacattggccgggagcccacggtgaggcattcgggggcctgatgggtgggagggggtggcccaggcacagccagggccctaactgaccaggcctcctcccactgcatctctgtcccctcttcctccctctgcctctgtgtctcctcaaaccccactccccaccgtttctccatgcccatctgtccatcctgcatcccggcctgggcccctggctctcctgcaccagctctgcaaggttctcaactccaccctcatcacctgcccgtcccccggggccctgagcaacgcatcagcgccagtggacttcttcatcaatgggcgggcctacgcagacgaggtggctgtggctgaggagctactggaccccgaggaggcacagcggggcagcaggttccgcctggactacctccccaacccacagttctctacggccaagagggagaagtggatcaagcaccaccccggggagcctctcaccctcgttatccacgtgagcaccaaaggggccggggtaggcgggggcaagcgagccagcctcagctgtgggcctcgggagcacttccccatgagcatcctccccctttgcacccacagaaggagcaggacagcctggggctccagagtcacgagtaccgggtcaagataggccaagtaagctgcgacatccagattgtctctgacagaatcatccactgctcggtcaacgagtccctgggcgcggccgtggggcagctgcccatcacagtgagtggatggggcgccggagcagggcagacctggccccacccctggcccatctgccaagcatctgcccctcacccagcacctgaattcactgagcgttttcacgctcaacagctcagtccagcaaagcagagctttacatccccacttgacatatgaggaaactgaggcccaagaacttagtgacttgcttgaggtcagtgatgggccccatctggacctggaccatcagaaaccataagaaattgtccctgtcccccttggcgtctatcctagagcctgggctgccaggcaccatgtagaggcaggggagcaggaggagcagagaggggccagaacactatctccttgcatgtctcctgggatggggagctcactctctcccaagcagcgtgtgccaccccaggatggctctgactgggaaagctttctttcacctgcacctcagtcccagtcctgcactctgagtcctcatacctcacctaccccctggtcccagggcagccttgcagatacttggggacagcagccaggccccgtgaactgcttcctcttgctcactcactactcctcccaggctgtaatgataatcacagccccctgcattgagccacctctgtgccaggcccaggaccaagggcttgacaagccctcatttagccttcccagtgtccccaggaggtggacattgttatctctatgttatcagtgtggcacctgaggctcagagaggttaggtaatttacccagggccacacagcaagtgaggagcagaactagagtataagtccaggaaagctacaacccccttccccaacctctgcacagatccaggtagggaacttcaaccagaccatcgccacactgcagctggggggcagcgagacggccatcatcgtgtccatcgtcatctgcagcgtcctgctgctgctctccgtggtgggtaaggagccccaccctcaggacaccttggagggcaggcttgccaccttgccccagcccctctgaagattggcagatgggagaaggcaggatgggatggggcacagcttgaacaaaggcttggccatgggaacaggttaggcacccagaggttgggggaggtgtgccctggctccagcaccaatgggtagaagatgttaggtggccaggggatatgctaggcccacgcccaggtccctgaatctcaagcagagaaatttggaaccatgttctccagtcaatagagagctactgaaggtacttaagagaggattactcaggaaaaattaacctacatgtctggtgggctataccactgttaaaataatggtcaataaagtaatagactcgatgtagcagagaaactggagccatcatacgctactagagggaatacaaaaaagcgcagctgctttggaaaacattttggaagtttcttaggatgtgaaacatagaattaccctatgacctatgacccagcaattccacccctagctatctgctcaagagaaatgaaaacgtagccacacaaaaacttgtacacacatgtttatagcaacattatttataataaccaggaagtcaaaacaacccaaatgtccatcaaccaataaatgaataaatgaaatatgatctattcatacaatggaaaattatttatccgtaagaaggagtggagtactgatccatgccaccatgggcaggcaccttgacaatattacactaaccaaaagaagactcaccaaaggcatattgtatgatgccatttatatgaaatgtttagaatagggaaattcatagagacagaaagctgaatggtgattgccagggactagggagaacacgaatggggagtgactgctgcatgggtatgggtcttcttggggcagcaaaaatgctctaaaattagtggtgatggttgcacaactctgtgaatatactagaaaccattgaattaggccaggctcagtggcttatgcctgtagtcccagcactttgggaggccaaggtgggtggctcacttgagcccaggagttcaagaccagcttgggcaacatggcaaaactttatctctacaaaaaatacaaaaattacctgggcatggtggcatgagtctgtagtcccagctactcaggaggctgaggtgggaggatcacctgagcctgggaggtggaggctgcagtgagatgtgatcgcgccactgtacttcagcctgggtgccagagtaagactgtctcaaaagaaaaaaagaaagaaaagaaaccattgaagtatacactttaaatcactggattatatggtatgtacgttatttcacaataaagctgttttatttttaaagtgagtatattcaatgcagaaaatttttggaaaaactgaaagatgataaaaggaaaaaatacccatcattaataccctgtgtatttttgtatcttccctcccagtctcttttctgaaaatactatatattaatagatattttaatacattatgtatatattcctccccaccccaggaaaggttataatgtaatattgctttgtaatctgcttttaaaagtttcttaatttacaagtaacacctggtcattgtagaaggaatagaaaatgctcaaaagcagaaagtaaaccgaagtcacccagaatcctcccacccaggaaagccactgttaaccactatttcacacacacgtattcctgtttctttttttttttaacggggctagacaaattctaacagagctgtaacactacacacttctttttctaaggacgggtcatcaggcattgctttgctggccattccccaagccctctgtccacgggagagctccccgcaactccccaccccccaccccaaccctgcccaggagggaggactgcagggcctcctcccacaccctgcccagaggagctggagcggaggccagaatacagcaggcgccaataaaggctttccaaagggcaccagaggcctgacctgcctctccactgcccgcagccctgttcgtcttctgtaccaagagccgacgtgctgagcgttactggcagaagacgctgctgcagatggaggagatggaatctcagatccgagaggaaatccgcaaaggtagtgggcggggaccctgcagggctgggcctcaactttccctcctaggggatgggttctcgggccgctcacggctgtccgtgtgtccgccaggcttcgctgagctgcagacagacatgacagatctcaccaaggagctgaaccgcagccagggcatccccttcctggagtataagcacttcgtgacccgcaccttcttccccaaggtcagcccgagcctgagcctgccctgaacctgtgccagccacctcaaggcaactcgacctctctgagccctgccagcctatagggtcccttgagcagtgccaaacctgcacagctgtccgcagccgtcctggccacttgccctggcctgccacggggagaagggttggaggcagattctccactgtcattctctgctcacttgatgtttaacagtccatatggaagccagctgcagccccgctgtcctggccagctgggcctgcctctccccttttcaaggtggggcagaagcggccagggctgtcccaggccagcctctctccttcctgtgcctcttcccagccaggcttcccttggtctctacactccctcctcctgtccactggactcctgccccatcccttccatgcctctcatgcctccccttgcccttccagggtccactaccctcactctacctcctagtggtaccaccctctctcccctgtccacaccattccccacacagtggccaaagcaagcccatgtttgactacatcatttttcacgaaaccctccagtagcttttcccagcctcaggctaaagctcagactcccagcctttctgcctcagtttcccccattgcacatggagctgcttttgcttccccttaagtcttgtgctgtcttgtgtggccacacccctggaattccacagcccccaggcttggcccactgcctcttagtcctttatggggagctaattccgtgccagtttcccccagcagcccaagccagtgcccctttctgtgtgagtgacctttccatgccagcagggggtgtccagccccgctgagatgctgggggtctgcctctgcagtgttcctccctttatgaagagcgttacgtgctgccctcccagaccctcaactcccagggcagctcccaggcacaggaaacccacccactgctgggagagtggaaggtgagtaccccacgacccacacacagtgggctgcttcagggcaaccctgctcccccctgggtcccctttccagttcatctaatgcattgatccctgtcatgcggagttgggaggcatctgccattgtaaggtactgagccctccatcccaggaggcattcaggcagccattcagggtattataagtgctgcccccgcaggccaggtagagcagacagaggattgggcccccctgtacaccccactcaacctgcttagaaaatggaaggtgagagtcctccacactgggatgccaggttacctccaggcacccttacccttctctgagccccacttttcaattcaaccaagctattgttccctgtcacaaaggttaggaggcatccaccgtggaaggtaatgagctccccatcccaggaggcatacaagcagccgtcgtaagcactggctgttaggctaggcagggacactgggcccctctggacaccccatcaccagttgcttccacagattcctgagagctgccggcccaacatggaagagggaattagcttgttctcctcactactcaacaacaagcacttcctcatcgtctttgtccacgcgctggagcagcagaaggactttgcggtgcgcgacaggtcaggctgtgacagactggggtggggtagggaagaggagcctgtccaaggccacacagcatcaggtcctgggtcctggggctctggggctcttgacacccccatattccagcccttcctgggccgggatgcccaagaccttggctcacggggcacgatggttgctgtggacgtagaagaaggtggctgtttctccaggaggattctagccccactcacccctcgcaggacccacccacacaggcactcctgggatcgatgggcccggggatgaggcggcactgagaccctgggacccacagctcctagggcctcaaggtgcagttgacacctgcctcccgctcacaggtgcagcctggcctcgctgctgaccatcgcgctgcacggcaagctggagtactacaccagcatcatgaaggagctgctggtggacctcattgacgcctcggccgccaagaaccccaagctcatgctgcggcgcacagagtctgtggtggagaagatgctcaccaactggatgtccatctgcatgtacagctgtctgcgggtgaggctgcctggggacagacagagcccaggcgggggacgtggcagggactcagcggcagtgaccccacggcctcccaggccttccctggcaccctcaggccagctctgccaggagggagtgttgcatgagacaggccaggcccgtaggacctgttatgcagagaggggagccatggccccggggaagcctggctggcttgctgcaagggctcaacggatgcttggggcataacagaggttgtgtcaggggccttgtcccatctgtggttttctcagtcatccacccttccctgctctggattcaggagatgaaatcagcccctggctggcccttgaggctctcccagccctaggctaggcgagacgtggaaacaaaatacagggtggccagtgcctcgcagcagagctcagctcacgaggcctccctctgtctgaaggcttcaaggtggcttcctggagcaggcaaccctgtgctgagacctaagagagtgagccaggcgaggagtggtggggagggtgctccaggcatcgggtacagcacaagggcagaggccgggaggaggggatgttcgtggaaggaatagaaggaaggccaaagaatcttctggatgagagcggaggctgggaagagggtgggcccggtaaccagggcctcctgcactctgccagaaggacccccataagctctcttcgcagagcaagggttgcttagcctcttgtcctgtcccactgtccagctgccctatggtggcagaggctagagggctgcctggaggattgtgggagaaaggcaaaggcctgcctggagcccagaaccggggcctcggatgttctgttttttgttattaatttttgaagagatgggggtcttgctttgttgcacaggctggtcccaaactcctgagctcaagcaatcctcccgctttggcctcccaaagtgctgggattacaggggtgagccactgcacccagccaagatgtcctgggcttgagtccaatctttggcacagcccagctgtgtgactctgggctactcattgccctctgtgggccttggtttccttctgtcaaatggggcctctgcccctgagcctggggcttgagggccaagtagcctgggggagccccacggctcctcctgggggaagggggtagtggggtggagcagaggcagggcctgggaggggccattggggtgcctccgccttctgcgggctgcctcactgtgggccatcaggaaccacaagggccactgtggaccctggacctcactcccctggcttctttctgtggcctcagccaggccttcccctatgagcctgtttcctcctctaggaagcagggaatcagtgcctcccacgccccagacctggagaattggaccaggacttgggctggcaggctgccttcgtaatctttgccaaatctgcctaatactattatgtacttaatttttctttaaatcaatttttgtggatagttaagtaaaactatcccagtggaacacctgggtcccttgctgggcaatggccttgagaatcagctcatggctgtgggtccagcagagccactgcctggagggccacccttggagatgggcaagagcagggacattgagccccattcctcctgagactccatagtcatcagcctgcaagtggggtcgaggccacatcggtgtttcgggtccacctaaactcacacttgggggccccccacttagtagaaagtcacaggcttgggagtcagccgagccaggtccgattcctgccctgccgcttcccagctgggtgatcttgggcaggtcacttgccctctctgagcctcggcactgttggctgcacagtaagaatgatactccgtatccggaagggttgccgggatgatgcaatgaatgcacccacccacagctggtggtgtttaatgaacacgagcttagggtccgtggagacaccctggagaggagagtgttgacaccaggatccaaaaggagactgttggaggggttgggggacgggggcgtgaaggtgtttggcccaaagcatgggggctggaatacagagggggccttggccctgatacccccgtgcccctcaggagacggtgggggagccattcttcctgctgctgtgtgccatcaagcagcaaatcaacaagggctccatcgacgccatcacaggcaaggcccgctacacactcaatgaggagtggctgctgcgggagaacatcgaggccaagccccgggtaagtcggcagggcggggagggtcccagggctgctgtgtcgccgccaacggcattgacccagccttcctctgcagggccttgctgcctgggcactgacatagtgatggcagcaactcactgacctttctctcccactctccccctgcagaacctgaacgtgtccttccagggctgtggcatggactcgctgagcgtgcgggccatggacaccgacacgctgacacaggtcaaggagaagatcctggaggccttctgcaagaatgtgccctactcccagtggccgcgtgcagaggacgtcgaccttggtgggtgggaatgggggcagagaccccgtgtcaggcgcttcagccggggctggcccctgccttgacgggaaacactcctttcacctggcatgggtgcatgaatgtggggacactgagaggatccaatgaggccccctcagcaagaagctcttactctgtaggagacaagtcctgcagtgtgagtgaactacggacaacagcaaaaagccttcaggaaaggcttcctaattcctaaaggagggatgctggagtagggttggtttgtttgtttgtttttgagacgggatctcattctgtcacccaggctggagtgcagtggcgcaatctcagctcactgcagcctcgacctcctgggctcaagtgatcccctcatttcagcctcctgagtagctgggactacaggagtgcaccaccacatccagctaattttactttttgtaaagatagtgtcatgctgtgctgcccaggctggtcttgaactcctgggctcaagcgatcctcctgcctcatcctcccaaagtgctgggattacaggtgtgagccaccgcgcggggcctggagtgggttttataggagtcttggttaggccaagggtttcatcagcaattgtaacatgaacagccttgcagacaaggccatttccagagctcctcctctgtgccctccaccctggcaccttctctttgtaccctcacactctcccccagctctttcctgccctccccattttacagatgggaaaatggaggctcagagagaggtatggcttgcctcagtttacatggagagagcgagaggcctctccctatgtggctgggccggtacctacccctcaggcccagctccctgcccggaccctgatggcctgtcccttgtcccccagagtggttcgcctccagcacacagagctacatccttcgggacctggacgacacctcagtggtggaagacggccgcaagaagcttaacacgctggcccattacaaggtgcagccctgccccccgcccccatttccccaccctcatgcccccaccccaacctccggcctctgacctcggcctctcccctcccatcagatccctgaaggtgcctccctggccatgagtctcatagacaagaaggacaacacactgggccgaggtagtgcgggtgcacgtgggaagggagcccaggctgcgtgtggacaggggcttccatcccatgccccagtggggaagctgaggctccgagaggcagggctggcctgggctgaggcctccttggtgggggctgggcggggccagcctcctctgacccagtactgctggggcagggcccacaccaggcctcctcaagctgatttcctgcggcagctggagagaggccccgggagggcgggatgcagttccaggaggtctgggcagcagccaggccagaaggggggccagcatgcccgtctcagccttgggccatgtccctgcctcaagtgccccctccacaccctcagacgccccaggcacagcctcctggctgccaggcctgcgagcccgggatcctctgggtctcggggtccccttctaaggttgagagcagagtctcagtctctcccagcagcctgggaatctgggctggcaggagctctgggctcaggggtggggtgggcaaaggcacccacccccgcctgcctggggcccctcctcccccgtggctgcatcttcctgtttctctccaccgctgtccctccttccaagtccctccatcccgggtcactgtgtgtgtgtctttctctctctgcctcactctgtctcgctcgctgtgtgtctctggatctcacttatctctctctccgtctctcccagactcagtctccccatgcgtctctgcatctctgtctcattctctctgactgtctctttggatctctgtctccgtttctgtttctctctccatctttctgtctctgcttctgtttctctccccatctttctgtcttgtttctgtttctcactccatctttctgtcttcatttctgtttctctcctctcctctcccatgtttatttattgtgtttttcctctcacagtgaaagacttggacacagagaagtatttccatttggtgagtgcccaacctcggccccgggggatccagcccctcagtgggtgtggccttggctttctgtggccctgggcctcttgggaaaagtgctcccagccctgcgaaaggctggggggtgggggagtagggatggggcccagaatcaggagggaaccacagcccttgtgtgctaagaagcatggcagagccagacctcccacaggcggccgaggatggggcctggtgcggacactgaccactgcccggcctcccaggtgctgcctacggacgagctggcggagcccaagaagtctcaccggcagagccatcgcaagaaggtgctcccggaaatctacctgacccgcctgctctccaccaaggtgagtccggcctcagtctcccctctgtgcagtgggtacaaggctccagccccagctccagagggtcattgctcagggccagctgtgcacccgcggctgggagaggggtgtgagttcttcctgtttcccctgtggggctggaggggcaagaggctgaaggcttagggtcccacttgaggaggcatttctcacagccaggaaaaatgcctgacagagacttctatgttagcccacgtaacagggtacagcagaggcccagagggatcagtgatgtccccaaggccacgtggctcagtggcagcgccggcaccccacagcccatactctggcacttccagttctcgactccatgtgccagtgcctcgattagtcctttcaacgcctctgggaggcaagtgagccagagaggctcggtgaccagcctgatgccatgtggcttcctcattcagcagcctggcatttcaagctccgcagagccaccaagggtgcccactagccctctgcacgtggcccggggctgacggcggccaccccactcccccgcagggcacgttgcagaagtttctggatgacctgttcaaggccattctgagtatccgtgaagacaagcccccactggctgtcaagtactttttcgacttcctggaggagcaggctgagaagaggggaatctccgaccccgacaccctacacatctggaagaccaacaggtggcgggtgggggggccgtgtggacttcactgtgccactggggcccctgtggcagggggttcagagtctagtcttctggcctcgcctgcttggggtcaagccctcctctgccatttcccagctgtgtgttctcggatgagtgacttagcctctctgtgcttcagtttcccctccactgtaaaatgcgacccatgttaatggtgggaattaactagaagagtgcccagaagcatggtctaggtgttgcccttactatcattctcccgcacccctctcaggtgggcaccatcagctccacttcacagataagcacactgaggctcggagaagcagcacctgctcaagaccacacagcctgggacagtagagccaggctcggccctacattatctgaatctcttacccagttggtagccctcctttgaggcacctcttagcttgtcggggtcatgcacccccacaagaagttgctggaaacccagcctgaccctcaggaagaataccaccagcccaggcgcctctgtgcagggcagcagcttcctagagctctgggggtacacatgcccaggctgctgagtcactgggtggcctgaggtgggggtgggggtgttgctcaccctctctggcctcttgaggacaaggccagagctccaggccctgccccccacagccctgccacagctgctctgctaatgtcggacttcctgctgcctgcaagggttcagggaggagccaggggtgcccgggggccggcacctggttctaatgagaaccaggacctgactggaggctcaggagggggttggggggtacagctaagccctgtagctcctgccttgctccagcaggaaaccgggctctcagccccactgcaccccagctggccagggataggcaaactaaggttcccaaaggtcacatcttgtgacaaggctccaacctcaggcccttgagggacaaagccagctctctcctccacaactgtccctcgactgcttcctaccccaccctaccctcactgtctttgtcaccctaccccacagccttcctctccggttctgggtgaacatcctgaagaacccccagtttgtctttgacatcgacaagacagaccacatcgacgcctgcctttcagtcatcgcgcaggccttcatcgacgcctgctccatctctgacctgcagctgggcaaggtcagctgttcccaggaccaggccaggcccatgcacagggccagagtggggtgccgaccatgggtagcctcctcgactctctgaggctgagctcagagatcttcctgggaggggaaccaaaagatctcaggtctaggggatgtgggatgagtgactcattcagacagggagacacctagaagccagtaccttccatcagaaactctgtatcgctgcagaccaactgcacatgctgcagctgtgcctggcactggctttgaacacaggcctgagaacccggtgtgggaaagccagtatgagcttggacaacctgcttggtcaggcacaacatcatctgaaaaccgggccaggctctgggcagtagcccctgaaagtcaaaagccattcaagcgagcattcagtgaaggggtgggcagaggggtgatgggtggctaggagctctgagattcatgcggtgtgttgggggcacacaaggctgtgtctggctttagaggttgaagatgaaagaggatggccttccaggcagagagaacggcgcaggcaaagacagggaggcaggaaagcagccggttgctgtgagcagggatgagattgtatcattaaagctggcactgcaggattggtccaggtcgtgtgtgaccctgcatttagcccacgcatttcagagacggaccacgggaaggagaaaatgccatcgctccactactactcacgtactgcctccgaaggcagggtgcccgtgactgacaaagaactgggagtgttcttggcacttctttcaggcgttaggagcatgtggtgggaaatattccactgagccagcactcaggcttccaggaatcctagccaccaagacctatcaccctgagaaggacacatccttgttacgtggaatgggctgcgtgcagtgaagagctggcatgcccgtgcacttttcccctgaaagaagtagggcccctccccacccacatcattgtcctaacagtcctggggaaagtaggcggggcagacagagcacagtgaggagcccctggtctggggccggctgagtgcggggacgttcagtgaccgggtgagactctttgggcctcgggggcctgctaaggtcacttatgtggcaggagggatgagggctcatccagaaaacgaccagatccgtcctttctccagcagccatctaacaccctcgctcttctctgcccaggattcgccaaccaacaagctcctctacgccaaggagattcctgagtaccggaagatcgtgcagcgctactacaagcagatccaggacatgacgccgctcagcgagcaagagatgaatgcccatctggccgaggagtcgagggtgcggtggctcggcggcgggggatgggggcctgaagagctgagggatcgggggtcgggggctgggcctcaatgcctccactggagtaagggcagggagcgcagagggcatttcagaagtggctgtggcctcttgctggcctgcaaattcgtcatgcattttcccagagtttgaggagcgggggcaggagagcaccctctggatggagaggagattggacttcagggtccgggaagccgtcttcgtccatgggacttgaggggcctcatcgctgaactgttctgtgggggccgtggggagttggggattgtgtgcaagcagctggctttgctgggactaggctcagctttgaccgctgggctaacctcctccccatcctgcctccttatagaaataccagaatgagttcaacaccaatgtggccatggcagagatttataagtacgccaagaggtatcggccgcaggtgagtgccccagggtgaggcacctgccctcggggtaggtgagcttcctactcaaggacacacatctcagggtgcttgcccctaatggacggatgtcactcgtggtagacgttcaggggtgtgttctctcccacgaactgaggcagggctaccggccatggcccggctgactccgctgctcccctcagatcatggccgcgctggaggccaaccccacggcccggaggacacaactgcagcacaagtttgagcaggtggtggctttgatggaggacaacatctacgagtgctacagtgaggcctgagacacatggagagttggtcaggctgctgctgggagaaatggacgcccactgggcctcaacttgatcttctaccccgtgcctgtgactcagactgggaaatactgagcagagacggctggggcgggggcaggaggaggggctgctctctgagacaggggcgcccccgccttgacccctgggcacctccatcccctcccacctgtccccagatcagtctctgggatggaggccagagagctggtcaggctcccccatctgcccagcacggcctgcactgtgcccacccacttgctccacaacgtccagttggtcctgctgccaagagccccgtgcatccaggcggccaagcacaaactgggggagaggaggccgccagcccggaggctgcagcccagaaactctacctcatccacactggtgcagggagccctccttgaactgacctttgattggtttctgcttcaactaccaaaatgttatctccacttccccctcacccgtagaggatcctggccacagacagtttcaagtagtgtcagatttttgttgcttgggcggctgttggtagagtgggcagtgcccgcgccatggggtgctctgtgggcttctccaggagcagggagggtggaggggagggatggggggcacaggagctgggagccccgtctccaggaaaaggagaggggttaagatgcaccgaggctgtagctgggctacttgatcttgctgaaagtgtttctaaagatagcaccacttttttttttaaagcttttatatattaaaaaacgtatcatgcaccaactgtgaatagctgccgcttgcgcagaggacccggggaggggtcccgagaggctccccatgcaacactggaaatgactgttccagagagcgggcagacctggcagagcgcccctggcgcctgagactaccacccactccgttcctgccagaaacgaccctctgtggccgatgggccatgcgggcccctcgcagccaactcagccagtgttgggactggctcagagcccatgggggctggaggggggcagctgggactctggaatcttctttataataaaagccttacggacaaacctactgtgggctccagcctttgtcctgagatagccaagcgggagaatgggcagtttctttaccagtttgtgagagagaggagggagggagcctgccgtccctcctgtctcagctgcactcttgaggtttgggcagacacctgactagcttctgagaaggcagtcagaggccaggagatgaaacgagacggtgcaggctgcatgcatgctgtgggcccggcccagagctgccattccttaagctctgaggacaccccgggacctccaggaagatttcacagctgctgtgtgctgcctgcaactgggtgggccctgctcctaacctcatctctaacaagcccgtcaggaatgtgctagcatccctgtatgacagacgcagcaacttgaggctcagcacagctgaagcaattctcaaggtcacacaaccaggaagggacagaataaggaccaggtcccatggtccttccgggccagagtctccacagtggtccccaaaatgggcggggaggccaaaggtgaccaccctggaaagggaactgacacttaacttaccccgaatttctcatcaagcttaaaaaatacgtagcattaagctcatttctcagacaaggaagcaggcagtttaacccccaagcccagtttaaccctaaacgctgttccccacaagtacaggctgttcctcacccctgcccacaagaacaatgaacctgatgcagacacccctttccagccctgctggctcctccccaaccccagggaaagatctcgagagccagctccaaaggtacagcaactccacttaatttcttgcttttttgaaggaaaaatagttacacatgtatttatcaagagtaagaactaggacaaaagattcataaaatttaaacaaaatcccacaaataccagttctaaaattaatgagaacagaaaagtgagaacagtaaacaaccttttgctttaaaaatagctttttcctacagtggcttctgtgtggagagatagtctttatctttcacattttctattctgagcattgattccttcttattaagcagcagattttctaatttaagttatcagcacatttgatagcattttgagggtgaggggggtgggtgtgattctggaatgaatacacggttcccagagaaatgtaggaagcacaaaaagcgtgaagaaaataaaagctgccctaaccgtttgtggcgagcgtctctgagaacgccagccgcacggggcgcttggatggggcggggccgaggagtgaactcaggatcagggtgtgcacaccattttgcaacctgattttcccccatgcgacaatatgtcagtaacatctttctatgtcattaaatattccacagcctgtcttaatgtctgattaacattcagttcctccttgacgtttagaaatgtatttgcaaatggaggaaatctctagtttccagagtcgtttctcagcgcagaaggtggccaccttccatgaaccaattataatccttatctggggctctgaggacctggcagctgtgggcaggagggaggttcctaccctttgagggtcataggaggctagggacccctgatgtagcatccttaaactaaactcctttgaaaaggaaagaaaccattgcagctaagggaggtaacttgcccaaggtttcatggatgctagacaccccccacccctgtccccagctcatggacgtgagatgcccactgatgccccccgcactgcaggctgcctgggggtgccacagcactgggccaagccgtgaatgagcagtggcaggagcagacccctcctcaggaagcaccagcccggccccatcccaccatctgctctgggtgcccttctgggtcctgctggcagccacattacagacaccccaggggggctgtcagcacatctaggcaaagccgggattccaggaggagagggtggggtggtggagcaggggcaggaagggagcagctgatgccccatgctgagcagcctgcttccctttgtgccccgtctgcccccttctcaagtcctgtgcagtttgcctctgactccctttagtccaccccttccttctctctgtcctccgtggctaggctgccacctctcatcaggaccatatctcggcagcctcctggcacgtgccaagtcctcacctcaggaaatggtcacccagcagtcacttagctatctagaccccaaattgtggactgactcatcagtgacccttcctacatccaatccatcagcagagcccgttcacaccatcttcaacagcgatccagaagctaccacttctaaccctccctctgtgagcatgtcctggctggtcaccacccccttcatctgggttgtggcaggagcctcctcacaggcctgtctgcccgcccacatccctgcagagactctgttgcttgccgtcctctaatggttccttatgacaaagcccaccgtgcttgcccttggcttacaaggccctgcgtgatccagccgccatctaccctgcagcccttgttccagtgaaaggaaggggatctgtttagaaagatatattgctatgggacacaccaccccagtacctagtggcttaaaataacagcagtcacttattttgcccacgaatctgcaatcagggcagggcttggcaggaaaggcttgtccctgttccaccaggtttctgctgggccagctcaattagggctggaagatgcagttccaacacgcattcagatggtggcacgtggtaccagctggtcagagagttcagcaggagctgaaaaatggagtcctcagttcctctccacaagctgcatgggctttcccatagagtggtggccaagtttgaagagtgagtatcacaaaacaaaaagtgtcctcaaacacaagaagtagaagctgccttaaggtggggcccagaaattatcacagcgtcattgtcaccaaattctactggtcaagtaatcatggagcccagagtcaagaggtagggacacagagcctgtctctccgtgtgaggagtgccgcagatgtttttaaagcaccttggacctcgtctcccatccctgtgctcctctttactgggctctagccacacagaccttcctgcagctcccagcgtgaggagcatgttcccaccccagggcctttgcattcactcttccttctgctgaaatggtaccccctccagacagagatccttgctcagacagcccgtccaaccctgtctaaactagcagccagccctacccaccccgctggaggcccagccccacctcttcttcagagcacaggcgctggctgcagagtaggacacctgtcagcctgtcgcagtgcctggcccaggagcactcgggaaccagtggctgaaaggtctccctgtcttctcagctactctaatccttcctttccactgccagagggttctttctaaacagatcccctcctttcatcccacccctcagatggcatcctctgcctcatctgcctgacaacagctacccatcctttaggatcaaaagccatctcatcctggaagcctgatcgcagggccaggttaatctccctccatcagcccctttgcatcccgatatctgtgctgcagccccatatagcacacagtctgtatccctgaggcaggacctcctatctgagccccagcattggccaggtaaacagcaggtgctcagcggatgttcatgaaggaccgaatggccaaatccttgaacctcagcctctacccacaccaattgtgaggaaaaagaaacaaaagtctttattgataaatagcttacaatgaaataaatagagcagtggttagttgaagaataaaaactagggcagaggctcggtctctctccgcccctgcctctggccctaagcttcagccctctggctggacactttggatgatgaggccttgatgggcagcccagcctttctagggcccttgggggcctctgtcttcctggacaaatgtgcaggtaccaccttggacccactgcccttagcaggagcagcagccttggtgtttggcccctgcccagctttaggggccttggccttggccaccaccttctttttggtcggggaagcagcaccattcttgacctatacgaaagcaaaccaggagcaaagagacagctgggaagggctgaaatcccagctctgggtggctctgggtacacaacatcgcccttctaagccttagtctcttatctgtaagatggggatggcaacacccccagggtgccaggggaccagagagaaggtggtggactgtgctttgtaggaaaagaaattgagccccatccctggatgacccttccgggggctgagtgtgggatgcccaagctctggcctgttcagggcaggcagccaggccaggaaattcatgcaggcacctaccttgctggccgtgggttttgaactcttactctcagctttggttttcctgtaggcctcagcatctcctggaatttgatggaggaggttttataggggaagaaggaggaactgctggtggggcaggaagtttcaggggctctagaacccccattcctcctgggtcctaggtcttcactcagttatgtgacatggggcaaatcatttagccactctgagcctcagtgacctagtttgaagactgggaataatagcatgcccctcacagagtggctggagggttaacggaagcacttgctctaggcaaagcactagtgctccaagcccaccaaagccaacgtctaacgggcctgtcagctcgagcctttagtttgtcttccacctggcagccaggatacttttttttacttttaagacagggtctcgctctgtcactgtgctggagtgtggtggggcgatctcagtttactgcagccttgacctcccaggctcaagcgatcctcctgcctcagcctcccaagtagctggggcaacaggtatgcaacaccatgccagctaatatttttattttttgcagagatgggatcctagtatcttgcccagattggtctctaattcctgggctcagcactcacctgtgtgacagagcaagagcctgtctctaaaagagagagaggaaaaaaaataataactctagccctagctgcttcctgtcagaatccttccacagctctgcattgtcctccagataaagccctgattccagctgcccttcacagcttctccttgccaaaactgtaggtagactgaattacatgcagttcctcaaatactccaccttctttttgtgttttgttttgagactgagtgtcactctgtcacccacgctggagtacagtggtgcgatctcggctcactgtaacatctgcctcctgggttcaagtgattttcctgcctcagccacccaagtacctgggattataggtgtacaccaccatgcccagctaatttttgtatttttagcagagacgggggttcaccatgttgaccaggttggtctcaaactcctgacctcaagggatccgcccgccttggcctcccaaagtgttaggcttacaggcatgagccaccatgcccggcctaaaaactccaccttctttatgcctccaggcctttacacaggcccttcccctgcttgagacaccttcctccactgcctcaagaatgagtcagtctcctggtctctgcttcccccttcataacccttgaaatgtctgcctccttcccccaaccagctaccatgagttctctctctccaggtcaagcccagcactcaggacacatgcactagataaggaaacccctctccagagctggctccccgcccccgctccagtggctgtcaagacccccatccccacaccaccccctacaagtcacacaactaccttggctgctcctgctgcctttggcctttgccttcctgctgagcccaccagcactggaaggtgcccgcatggccttgtctggcttggggggcaccttcctagcctctcccgactgtgccctggtgtccttggccgcgccgccttgcttgcgagccttctctgtggctgcgcctggcttgggaggaggcttctgcacctttgctggcctcttggctgcctttttcaccttgcccacgttgggagggtcctccttggcctcacttggtttcttggggcccttccccttggcctcacccgctctcctgggagccgtcgcgggggccatcttcctgggctggattttcttcttgtgcttgggaactaactggagaaggacacggggtggggctgaaagcagagcctcaggtgcctcacgccccccaccccccgtaagactccgaatgggaggcctcgttccaaacaggggggctccacaggcagtgagaggcagggagaaggcacgaagccactgtccttggaggcactgtctactatgattctaggatctcaggatctctcaaccacctgccctaggcctgccactttcccacagattgtgcctctggactcctcctcccccactaccctgaagcgctgccctgcctcatgccccatgcccccaccacctcgccccttgacgctcagcagaacatgggctgaggtcagatggctctgggctcacagcttcctccgccctcctccagccgtgtaccacagccacgtcttctcatctttacagcaggacaatcaccaaggctgtgagcggcagggaagggagggctcctggcaagctgtttctttcctgtcccccaaccctcagggctccccatcaccaagactagaaactaccttcacccctcaactgccagcacaccgcatcagacacctgacgcccctctggctcttctccctgcttagccgcctggtcctgctgtgacgcaagtccaggctctgacccacgcccaggagttctaccagggtgggactttctgtgatctgtcaccaggtaaccacagggaccggcttggggtaggctgagaatgttccccagcattccatggcaactgtcatggcagctgctacatgcaggaagttaggcaagatgcaggggacccagcaatgacaagtcaggccgtgggtctggtccctgaggtattcctggtggctgatgacagtcctgatgttggggtgcagttttgtcccagacctgcctcagctctgagtgacctggcatgggtccccttttggagcctccttataaagatgaaactctcccctttgaaacggaggacatggctgctcagggaggtgccagcagagggaaaaccctttgctgtggtgaggaattccaggaaggggctacgtgcccaggacccagaagttagcacagctgacacaggccctgggatcccaaacatgcaacagttcacctgtcctggacaccaacagggtgactcttgcagtgggagctcagagagggcacactacctgccttcctagaggagagggcatctcggctgagaccacaggaggaacaaggacaggggaccggaggggaaaggccttccagtagaggccgcagcactcacagaggccaggaccattgctccaaccctgggctatgtcctccctcaggggcgcttactttgaagctgccagtggcccccctggctttggagttgaggggcctggcgaggaggccacggcgcatgccagtggccagcgcctgcttcagcaggtacttgaagcggaggacgtccactgttgggtacttgtgcaggatgtagagcttgatagctgccaccgacgtgccccggcgctgctccccagcctgcagcgcctccagcaccatgcgtagcaccggggggtggcggcgtcccaccgggaggctgctgtggctcgggcctcctggtgggacaccgccgtggctcgggcctgaggagagatggcaggccatcacccggggcccagtcacaactcagtggcaggcatcagctggcccgtggggggtgggtgagggtccagcaaggatcagatgcccccctctccccaagacactgaccgctggcatgggagctcccggatggtctcccctcaaggctcactgagtctctctctctttttttctttgagacactgtctctctatgtccccaggctggagtgcaatggcgtgatctcagctcactgcaacctccacctcctgggttcaagcagttctcctgcctcagcctcccaagtagctgggattacaggcgctgccaccatacctggctgatttttgtatttttagtagagacaaggtttcaccatgttggccaggctggtcttgaactcctgacctcatgacccacccgcctcggcctcccaaagtgctgggattacaggcttgagccaccgtgcccagccaaatctctctttttaaagaatggagtattcctttagaaaaacaatctaaattgggtgaatttcgtaactgtgggtttacaggacctccgggggctatgtgcacattctcagaggcacccagactgagagactctccagggcacacagccgggtttcttccacaaataaggggggaaagaaaaagtgggaggggcaccctatggactaaaggtccttaggaaacctctcaaccaaatgctcattcccagagcaggatttgaacaatccaactggaaaaagaaaggcaacagataaatgtgagcactggaaggaaatatcggatattagggataatattgtttcaagtgtgctaatggtattacaattgctttttaaaaggctcttatctgttaaaggtaaatattataaaagatatttacagatgaaatgatacataaatccagcatttgctttgaaataacccagcagatgaaacaagagtgtccacaagatggtgactgttggagctgggtgacgggtacagtggaagggagttacagaccatttggtagtctacttttgtatccatttgaaagttttttgttttgttttatggagacagggtctcaatctgtcacccaagctggagtgcagtgccacaatcatggctcactgcagccttgacctctccagctcaagtgatcctcttgcctcagtctccgaagtagctgggaccacaggcacacaccaccacgcctggctaatgtttgtattattatcattattattattattattattattattattattattgttattgttatttgacacaggtctcactacattgctcagtttagtctcaaactcctgagttcaagctatcttcccacctcagtctcccaaagtgctaggattacaagcatgagccaccatgctcggccctgaaagttttcataataaaaagttaccaaaaaattccactcttcggtatatacctgagggaaatgaaaacgcatgtccacacaaaaatgtacacatgaatgttcatagcagcactattcatgtcggcccaaagatggaaccagcccaaacatccatgatgaatgattgacagatggatgaacaaaatgtggtcgctacccatcccgtggaatattatccagccatacaaaggagtgaagccctggctacgacatggaggagccctgaaacatgcaaagtgaaaaaaggcagtcagaaaaagccacatactgtctgattccatttatatgaaatgtccagaataagaagtccatagatgcagaaagcagattggtggttgccagggctggggagtgggggtggagagtgactgctaatgggtactggttttcttgaagtgatgaaaatattctaaaattgattatagagatggatacacaactctgagtataccaaaagccattgtacactttaaagggtgaattgtattgtatgggaattatttctcaataaggtgttataaaatagttgcaaatgaagtgggatcaagggtgggggaagcatgagaagttgtcagtcaccatgaaatgcataaaagggatttaaatatgaaaccggatttaaatgtggtgaatggaaatgttgatttctgatcaatctgcagaatttaaagacttaaattctgggcaatatcgtgagacctcgactctacgaaaatctttaaaaatgagcagagtgtggtggtgtgtgcctataggcctagctacttgggaggctgaggtgg

SEQ ID NO: 824 - DNA, 378 bp, Homo sapiens
cagggtgcagccctggagtgtagttttgggctggaggagatcttcgaggctgtgtgggtgaatgagtctgttgtacgctgtgaccaggtggtggtgagtggggtgactccagcatgggcggagggcgggcctgcgttaacagccccaacttcatctgcctccatgacacccatccccagcagagccccaggcattgcccatgccccctatgctcttttctgcccttttgcagctgcacacgacccggaagagccaggaaacaggacacagtccctctgcagagcttgtaaggacctgatgagccagggctcgcccaaccttgagcgtggcatctggggtgtggtcagctcccctcgcgtggcagctgtgcagttgctg

SEQ ID NO: 825 - protein, 72 aa, Homo sapiens
MTPIPSRAPGIAHAPYALFCPFAAAHDPEEPGNRTQSLCRACKDLMSQGSPNLERGIWGVVSSPRVAAVQLL

SEQ ID NO: 826 - DNA, 7047 bp, Homo sapiens
ccgggctgcgcggcgaggctgagccgggcccgggcgccggggccgggggcggctggcgcgggcaggaagcgcctcgcggcccgggcccgccccccgcctctcgcccgctccgggctcccggctcccggccggcgctcgtcccatgcaatagccgtgccgcgcagcccgcgcacgcccggatggctcttcgcgccgcgggcggcgcaccctttagcggcccggcgccgctgccagccccccgccgttccagacgccgccgcggtgcccggtgccgctgctgttgctgctgctcctgggggcggcgcgggccggcgccctggagatccagcgtcggttcccctcgcccacgcccaccaacaacttcgccctggacggcgcggcggggaccgtgtacctggcggccgtcaaccgcctctatcagctgtcgggcgccaacctgagcctggaggccgaggcggccgtgggcccggtgcccgacagcccgctgtgtcacgctccgcagctgccgcaggcctcgtgcgagcacccgcggcgcctcacggacaactacaacaagatcctgcagctggaccccggccagggcctggtagtcgtgtgcgggtccatctaccagggcttctgccagctgcggcgccggggcaacatctcggccgtggccgtgcgcttcccgcccgccgcgccgcccgccgagcccgtcacggtgttccccagcatgctgaacgtggcggccaaccacccgaacgcgtccaccgtggggctagttctgcctcccgccgcgggcgcggggggcagccgcctgctcgtgggcgccacgtacaccggttacggcagctccttcttcccgcgcaaccgcagcctggaggaccaccgcttcgagaacacgcccgagatcgccatccgctccctggacacgcgcggcgacctggccaagctcttcaccttcgacctcaacccctccgacgacaacatcctcaagatcaagcagggcgccaaggagcagcacaagctgggcttcgtgagcgccttcctgcacccgtccgacccgccgccgggtgcacagtcctacgcgtacctggcgctcaacagcgaggcgcgcgcgggcgacaaggagagccaggcgcggagcctgctggcgcgcatctgcctgccccacggcgccggcggcgacgccaagaagctcaccgagtcctacatccagttgggcttgcagtgcgcgggcggcgcgggccgcggcgacctctacagccgcctggtgtcggtcttcccagcccgggagcggctctttgctgtcttcgagcggccccaggggtcccccgcggcccgcgctgctccggccgcactctgcgccttccgcttcgccgacgtgcgagccgccatccgagctgcgcgcaccgcctgcttcgtggaaccggcgcccgacgtggtggcggtgctcgacagcgtggtgcagggcacgggaccggcctgcgagcgcaagctcaacatccagctccagccagagcagctggactgtggagctgctcacctgcagcacccgctgtccatcctgcagcccctgaaggccacgcccgtgttccgcgccccgggcctcacctccgtggccgtggccagcgtcaacaactacacagcggtcttcctgggcacggtcaacgggaggcttctcaagatcaacctgaacgagagcatgcaggtggtgagcaggcgggtggtgactgtggcctatggggagcccgtgcaccatgtcatgcagtttgacccagcagactccggttacctttacctgatgacgtcccaccagatggccagggtgaaggtcgccgcctgcaacgtgcactccacctgtggggactgcgtgggtgcggcggacgcctactgcggctggtgtgccctggagacgcggtgcaccttgcagcaggactgcaccaattccagccagcagcatttctggaccagtgccagcgagggccccagccgctgtcctgccatgaccgtcctgccttccgagatcgatgtgcgccaggagtacccaggcatgatcctgcagatctcgggcagcctgcccagcctcagtggcatggagatggcctgtgactatgggaacaacatccgcactgtggctcgggtcccaggccctgcctttggtcaccagattgcctactgcaacctcctgccgagggaccagtttccgcccttcccccccaaccaggaccacgtgactgttgagatgtctgtgagggtcaatgggcggaacatcgtcaaggccaatttcaccatctacgactgcagccgcactgcacaagtgtacccccacacagcctgtaccagctgcctgtcggcacagtggccctgtttctggtgcagccagcagcactcctgtgtttccaaccagtctcggtgcgaggcctcaccaaaccccacgagccctcaggactgcccccggaccctgctctcacccctggcacccgtgcctacgggtggctcccagaacatcctggtgcctctggccaacactgcctttttccagggtgcagccctggagtgtagttttgggctggaggagatcttcgaggctgtgtgggtgaatgagtctgttgtacgctgtgaccaggtggtgctgcacacgacccggaagagccaggtgttcccgctcagcctccaactaaaggggcggccagcccgattcctggacagccctgagcccatgacagtcatggtctataactgtgccatgggcagccccgactgttcccagtgcctgggccgcgaagacctgggtcacctgtgcatgtggagtgatggctgccgcctgcgggggcctctgcagcccatggctggcacctgccccgcccccgagatccgcgcgattgagcccctgagtggcccgttggacggtgggaccctgctgaccatccgaggaaggaacctgggccggcggctcagtgacgtggcccacggcgtgtggattggtggtgtggcctgtgagccactgcctgacagatacacggtgtcggaggagatcgtgtgtgtcacagggccagccccaggaccactctcaggtgtggtgaccgtgaacgcctctaaggagggcaagtcccgggaccgcttctcctacgtgctgcccctggtccactccctggagcctaccatgggccccaaggccgggggcaccaggatcaccatccatgggaatgacctccatgtaggctccgagctccaggtcctggtgaacgacacagacccctgcacggagctgatgcgcacagataccagcatcgcctgcaccatgcctgagggggccctgccggctccggtgcctgtgtgtgtgcgcttcgagcgtcggggctgcgtgcacggcaacctcaccttctggtacatgcagaacccggtcatcacggccatcagtccccgccgcagccctgtcagtggcggcaggaccatcacagtggctggtgagcgtttccacatggtgcagaatgtgtccatggccgtccaccacattggccgggagcccacgctctgcaaggttctcaactccaccctcatcacctgcccgtcccccggggccctgagcaacgcatcagcgccagtggacttcttcatcaatgggcgggcctacgcagacgaggtggctgtggctgaggagctactggaccccgaggaggcacagcggggcagcaggttccgcctggactacctccccaacccacagttctctacggccaagagggagaagtggatcaagcaccaccccggggagcctctcaccctcgttatccacaaggagcaggacagcctggggctccagagtcacgagtaccgggtcaagataggccaagtaagctgcgacatccagattgtctctgacagaatcatccactgctcggtcaacgagtccctgggcgcggccgtggggcagctgcccatcacaatccaggtagggaacttcaaccagaccatcgccacactgcagctggggggcagcgagacggccatcatcgtgtccatcgtcatctgcagcgtcctgctgctgctctccgtggtggccctgttcgtcttctgtaccaagagccgacgtgctgagcgttactggcagaagacgctgctgcagatggaggagatggaatctcagatccgagaggaaatccgcaaaggcttcgctgagctgcagacagacatgacagatctcaccaaggagctgaaccgcagccagggcatccccttcctggagtataagcacttcgtgacccgcaccttcttccccaagtgttcctccctttatgaagagcgttacgtgctgccctcccagaccctcaactcccagggcagctcccaggcacaggaaacccacccactgctgggagagtggaagattcctgagagctgccggcccaacatggaagagggaattagcttgttctcctcactactcaacaacaagcacttcctcatcgtctttgtccacgcgctggagcagcagaaggactttgcggtgcgcgacaggtgcagcctggcctcgctgctgaccatcgcgctgcacggcaagctggagtactacaccagcatcatgaaggagctgctggtggacctcattgacgcctcggccgccaagaaccccaagctcatgctgcggcgcacagagtctgtggtggagaagatgctcaccaactggatgtccatctgcatgtacagctgtctgcgggagacggtgggggagccattcttcctgctgctgtgtgccatcaagcagcaaatcaacaagggctccatcgacgccatcacaggcaaggcccgctacacactcaatgaggagtggctgctgcgggagaacatcgaggccaagccccggaacctgaacgtgtccttccagggctgtggcatggactcgctgagcgtgcgggccatggacaccgacacgctgacacaggtcaaggagaagatcctggaggccttctgcaagaatgtgccctactcccagtggccgcgtgcagaggacgtcgaccttgagtggttcgcctccagcacacagagctacatccttcgggacctggacgacacctcagtggtggaagacggccgcaagaagcttaacacgctggcccattacaagatccctgaaggtgcctccctggccatgagtctcatagacaagaaggacaacacactgggccgagtgaaagacttggacacagagaagtatttccatttggtgctgcctacggacgagctggcggagcccaagaagtctcaccggcagagccatcgcaagaaggtgctcccggaaatctacctgacccgcctgctctccaccaagggcacgttgcagaagtttctggatgacctgttcaaggccattctgagtatccgtgaagacaagcccccactggctgtcaagtactttttcgacttcctggaggagcaggctgagaagaggggaatctccgaccccgacaccctacacatctggaagaccaacagccttcctctccggttctgggtgaacatcctgaagaacccccagtttgtctttgacatcgacaagacagaccacatcgacgcctgcctttcagtcatcgcgcaggccttcatcgacgcctgctccatctctgacctgcagctgggcaaggattcgccaaccaacaagctcctctacgccaaggagattcctgagtaccggaagatcgtgcagcgctactacaagcagatccaggacatgacgccgctcagcgagcaagagatgaatgcccatctggccgaggagtcgaggaaataccagaatgagttcaacaccaatgtggccatggcagagatttataagtacgccaagaggtatcggccgcagatcatggccgcgctggaggccaaccccacggcccggaggacacaactgcagcacaagtttgagcaggtggtggctttgatggaggacaacatctacgagtgctacagtgaggcctgagacacatggagagttggtcaggctgctgctgggagaaatggacgcccactgggcctcaacttgatcttctaccccgtgcctgtgactcagactgggaaatactgagcagagacggctggggcgggggcaggaggaggggctgctctctgagacaggggcgcccccgccttgacccctgggcacctccatcccctcccacctgtccccagatcagtctctgggatggaggccagagagctggtcaggctcccccatctgcccagcacggcctgcactgtgcccacccacttgctccacaacgtccagttggtcctgctgccaagagccccgtgcatccaggcggccaagcacaaactgggggagaggaggccgccagcccggaggctgcagcccagaaactctacctcatccacactggtgcagggagccctccttgaactgacctttgattggtttctgcttcaactaccaaaatgttatctccacttccccctcacccgtagaggatcctggccacagacagtttcaagtagtgtcagatttttgttgcttgggcggctgttggtagagtgggcagtgcccgcgccatggggtgctctgtgggcttctccaggagcagggagggtggaggggagggatggggggcacaggagctgggagccccgtctccaggaaaaggagaggggttaagatgcaccgaggctgtagctgggctacttgatcttgctgaaagtgtttctaaagatagcaccacttttttttttaaagcttttatatattaaaaaacgtatcatgcaccaactgtgaatagctgccgcttgcgcagaggacccggggaggggtcccgagaggctccccatgcaacactggaaatgactgttccagagagcgggcagacctggcagagcgcccctggcgcctgagactaccacccactccgttcctgccagaaacgaccctctgtggccgatgggccatgcgggcccctcgcagccaactcagccagtgttgggactggctcagagcccatgggggctggaggggggcagctgggactctggaatcttctttataataaaagccttacggac

SEQ ID NO: 827 - protein, 1735 aa, Homo sapiens
MLNVAANHPNASTVGLVLPPAAGAGGSRLLVGATYTGYGSSFFPRNRSLEDHRFENTPEIAIRSLDTRGDLAKLFTFDLNPSDDNILKIKQGAKEQHKLGFVSAFLHPSDPPPGAQSYAYLALNSEARAGDKESQARSLLARICLPHGAGGDAKKLTESYIQLGLQCAGGAGRGDKRLVSVFPARERLFAVFERPQGSPAARAAPAALCAFRFADVRAAIRAARTACFVEPAPDVVAVLDSVVQGTGPACERKLNIQLQPEQLDCGAAHLQHPLSILQPLKATPVFRAPGLTSVAVASVNNYTAVFLGTVNGRLLKINLNESMQVVSRRVVTVAYGEPVHHVMQFDPADSGYLYLMTSHQMARVKVAACNVHSTCGDCVGAADAYCGWCALETRCTLQQDCTNSSQQHFWTSASEGPSRCPAMTVLPSEIDVRQEYPGMILQISGSLPSLSGMEMACDYGNNIRTVARVPGPAFGHQIAYCNLLPRDQFPPFPPNQDHVTVEMSVRVNGRNIVKANFTIYDCSRTAQVYPHTACTSCLSAQWPCFWCSQQHSCVSNQSRCEDNPTSPQDCPRTLLSPLAPVPTGGSQNILVPLANTAFFQGAALECSFGLEEIFEAVWVNESVVRCDQVVLHTTRKSQVFPLSLQLKGRPARFLDSPEPMTVMVYNCAMGSPDCSQCLGREDLGHLCMWSDGCRLRGPLQPMAGTCPAPEIRAIEPLSGPLDGGTLLTIRGRNLGRRLSDVAHGVWIGGVACEPLPDRYTVSEEIVCVTGPAPGPLSGVVTVNASKEGKSRDRFSYVLPLVHSLEPTMGPKAGGTRITIHGNDLHVGSELQVLVNDTDPCTELMRTDTSIACTMPEGALPAPVPVCVRFERRGCVHGNLTFWYMQNPVITAISPRRSPVSGGRTITVAGERFHMVQNVSMAVHHIGREPTLCKVLNSTLITCPSPGALSNASAPVDFFINGRAYADEVAVAEELLDPEEAQRGSRFRLDYLPNPQFSTAKREKWIKHHPGEPLTLVIHKEQDSLGLQSHEYRVKIGQVSCDIQIVSDRIIHCSVNESLGAAVGQLPITIQVGNFNQTIATLQLGGSETAIIVSIVICSVLLLLSVVFVFCTKSRRAERYWQKTLLQMEEMESQIREEIRKGFAELQTDMTDLTKELNRSQGIPFLEYKHFVTRTFFPKCSSLYEERYVLPSQTLNSQGSSQAQETHPLLGEWKIPESCRPNMEEGISLFSSLLNNKHFLIVFVHALEQQKDFAVRDRCSLASLLTIALHGKLEYYTSIMKELLVDLIDASAAKNPKLMLRRTESVVEKMLTNWMSICMYSCLRETVGEPFFLLLCAIKQQINKGSIDAITGKARYTLNEEWLLRENIEAKPRNLNVSFQGCGMDSLSVRAMDTDTLTQVKEKIAFCKNVPYSQWPRAEDVDLEWFASSTQSYILRDLDDTSVVEDGRKKLNTLAHYKIPEGASLAMSLIDKKDNTLGRVKDLDTEKYFHLVLPTDELAEPKKSHRQSHRKKVLPEIYLTRLLSTKGTLQKFLDDLFKAILSIREDKPPLAVKYFFDFLEEQAEKRGISDPDTLHIWKTNSLPLRFWVNILKNPQFVFDIDKTDHIDACLSVIAQAFIDACSISDLQLGKDSPTNKLLYAKEIPEYRKIVQRYYKQIQDMTPLSEQEMNAHLAEESRKYQNEFNTNVAMAEIYKYAKRYRPQIMAALEANPTARRTQLQHKFEQVVMEDNIYECEA

SEQ ID NO: 828 - DNA, 6945 bp, Homo sapiens
ccgggctgcgcggcgaggctgagccgggcccgggcgccggggccgggggcggctggcgcgggcaggaagcgcctcgcggcccgggcccgccccccgcctctcgcccgctccgggctcccggctcccggccggcgctcgtcccatgcaatagccgtgccgcgcagcccgcgcacgcccggatggctcttcgcgccgcgggcggcgcaccctttagcggcccggcgccgctgccagccccccgccgttccagacgccgccgcggtgcccggtgccgctgctgttgctgctgctcctgggggcggcgcgggccggcgccctggagatccagcgtcggttcccctcgcccacgcccaccaacaacttcgccctggacggcgcggcggggaccgtgtacctggcggccgtcaaccgcctctatcagctgtcgggcgccaacctgagcctggaggccgaggcggccgtgggcccggtgcccgacagcccgctgtgtcacgctccgcagctgccgcaggcctcgtgcgagcacccgcggcgcctcacggacaactacaacaagatcctgcagctggaccccggccagggcctggtagtcgtgtgcgggtccatctaccagggcttctgccagctgcggcgccggggcaacatctcggccgtggccgtgcgcttcccgcccgccgcgccgcccgccgagcccgtcacggtgttccccagcatgctgaacgtggcggccaaccacccgaacgcgtccaccgtggggctagttctgcctcccgccgcgggcgcggggggcagccgcctgctcgtgggcgccacgtacaccggttacggcagctccttcttcccgcgcaaccgcagcctggaggaccaccgcttcgagaacacgcccgagatcgccatccgctccctggacacgcgcggcgacctggccaagctcttcaccttcgacctcaacccctccgacgacaacatcctcaagatcaagcagggcgccaaggagcagcacaagctgggcttcgtgagcgccttcctgcacccgtccgacccgccgccgggtgcacagtcctacgcgtacctggcgctcaacagcgaggcgcgcgcgggcgacaaggagagccaggcgcggagcctgctggcgcgcatctgcctgccccacggcgccggcggcgacgccaagaagctcaccgagtcctacatccagttgggcttgcagtgcgcgggcggcgcgggccgcggcgacctctacagccgcctggtgtcggtcttcccagcccgggagcggctctttgctgtcttcgagcggccccaggggtcccccgcggcccgcgctgctccggccgcactctgcgccttccgcttcgccgacgtgcgagccgccatccgagctgcgcgcaccgcctgcttcgtggaaccggcgcccgacgtggtggcggtgctcgacagcgtggtgcagggcacgggaccggcctgcgagcgcaagctcaacatccagctccagccagagcagctggactgtggagctgctcacctgcagcacccgctgtccatcctgcagcccctgaaggccacgcccgtgttccgcgccccgggcctcacctccgtggccgtggccagcgtcaacaactacacagcggtcttcctgggcacggtcaacgggaggcttctcaagatcaacctgaacgagagcatgcaggtggtgagcaggcgggtggtgactgtggcctatggggagcccgtgcaccatgtcatgcagtttgacccagcagactccggttacctttacctgatgacgtcccaccagatggccagggtgaaggtcgccgcctgcaacgtgcactccacctgtggggactgcgtgggtgcggcggacgcctactgcggctggtgtgccctggagacgcggtgcaccttgcagcaggactgcaccaattccagccagcagcatttctggaccagtgccagcgagggccccagccgctgtcctgccatgaccgtcctgccttccgagatcgatgtgcgccaggagtacccaggcatgatcctgcagatctcgggcagcctgcccagcctcagtggcatggagatggcctgtgactatgggaacaacatccgcactgtggctcgggtcccaggccctgcctttggtcaccagattgcctactgcaacctcctgccgagggaccagtttccgcccttcccccccaaccaggaccacgtgactgttgagatgtctgtgagggtcaatgggcggaacatcgtcaaggccaatttcaccatctacgactgcagccgcactgcacaagtgtacccccacacagcctgtaccagctgcctgtcggcacagtggccctgtttctggtgcagccagcagcactcctgtgtttccaaccagtctcggtgcgaggcctcaccaaaccccacgagccctcaggactgcccccggaccctgctctcacccctggcacccgtgcctacgggtggctcccagaacatcctggtgcctctggccaacactgcctttttccagggtgcagccctggagtgtagttttgggctggaggagatcttcgaggctgtgtgggtgaatgagtctgttgtacgctgtgaccaggtggtgctgcacacgacccggaagagccaggtgttcccgctcagcctccaactaaaggggcggccagcccgattcctggacagccctgagcccatgacagtcatggtctataactgtgccatgggcagccccgactgttcccagtgcctgggccgcgaagacctgggtcacctgtgcatgtggagtgatggctgccgcctgcgggggcctctgcagcccatggctggcacctgccccgcccccgagatccgcgcgattgagcccctgagtggcccgttggacggtgggaccctgctgaccatccgaggaaggaacctgggccggcggctcagtgacgtggcccacggcgtgtggattggtggtgtggcctgtgagccactgcctgacagatacacggtgtcggaggaggtggccgtgggggccaaggaccgctggctgaccacagcacctcccctcaggatcgtgtgtgtcacagggccagccccaggaccactctcaggtgtggtgaccgtgaacgcctctaaggagggcaagtcccgggaccgcttctcctacgtgctgcccctggtccactccctggagcctaccatgggccccaaggccgggggcaccaggatcaccatccatgggaatgacctccatgtaggctccgagctccaggtcctggtgaacgacacagacccctgcacggagctgatgcgcacagataccagcatcgcctgcaccatgcctgagggggccctgccggctccggtgcctgtgtgtgtgcgcttcgagcgtcggggctgcgtgcacggcaacctcaccttctggtacatgcagaacccggtcatcacggccatcagtccccgccgcagccctgtcaggctctctggggctgcaggtgcactgataggttttgctgtcccccgcagtggcggcaggaccatcacagtggctggtgagcgtttccacatggtgcagaatgtgtccatggccgtccaccacattggccgggagcccacgctctgcaaggttctcaactccaccctcatcacctgcccgtcccccggggccctgagcaacgcatcagcgccagtggacttcttcatcaatgggcgggcctacgcagacgaggtggctgtggctgaggagctactggaccccgaggaggcacagcggggcagcaggttccgcctggactacctccccaacccacagttctctacggccaagagggagaagtggatcaagcaccaccccggggagcctctcaccctcgttatccacgtgagcaccaaaggggccgggaaggagcaggacagcctggggctccagagtcacgagtaccgggtcaagataggccaagtaagctgcgacatccagattgtctctgacagaatcatccactgctcggtcaacgagtccctgggcgcggccgtggggcagctgcccatcacaatccaggtagggaacttcaaccagaccatcgccacactgcagctggggggcagcgagacggccatcatcgtgtccatcgtcatctgcagcgtcctgctgctgctctccgtggtggccctgttcgtcttctgtaccaagagccgacgtgctgagcgttactggcagaagacgctgctgcagatggaggagatggaatctcagatccgagaggaaatccgcaaaggggatgggttctcgggccgctcacggctgtccgtgtgtccgccaggcttcgctgagctgcagacagacatgacagatctcaccaaggagctgaaccgcagccagggcatccccttcctggagtataagcacttcgtgacccgcaccttcttccccaagtgttcctccctttatgaagagcgttacgtgctgccctcccagaccctcaactcccagggcagctcccaggcacaggaaacccacccactgctgggagagtggaagattcctgagagctgccggcccaacatggaagagggaattagcttgttctcctcactactcaacaacaagcacttcctcatcgtctttgtccacgcgctggagcagcagaaggactttgcggtgcgcgacaggtgcagcctggcctcgctgctgaccatcgcgctgcacggcaagctggagtactacaccagcatcatgaaggagctgctggtggacctcattgacgcctcggccgccaagaaccccaagctcatgctgcggcgcacagagtctgtggtggagaagatgctcaccaactggatgtccatctgcatgtacagctgtctgcgggagacggtgggggagccattcttcctgctgctgtgtgccatcaagcagcaaatcaacaagggctccatcgacgccatcacaggcaaggcccgctacacactcaatgaggagtggctgctgcgggagaacatcgaggccaagccccggaacctgaacgtgtccttccagggctgtggcatggactcgctgagcgtgcgggccatggacaccgacacgctgacacaggtcaaggagaagatcctggaggccttctgcaagaatgtgccctactcccagtggccgcgtgcagaggacgtcgaccttgagtggttcgcctccagcacacagagctacatccttcgggacctggacgacacctcagtggtggaagacggccgcaagaagcttaacacgctggcccattacaagatccctgaaggtgcctccctggccatgagtctcatagacaagaaggacaacacactgggccgagtgaaagacttggacacagagaagtatttccatttggtgctgcctacggacgagctggcggagcccaagaagtctcaccggcagagccatcgcaagaaggtgctcccggaaatctacctgacccgcctgctctccaccaagggcacgttgcagaagtttctggatgacctgttcaaggccattctgagtatccgtgaagacaagcccccactggctgtcaagtactttttcgacttcctggaggagcaggctgagaagaggggaatctccgaccccgacaccctacacatctggaagaccaacagccttcctctccggttctgggtgaacatcctgaagaacccccagtttgtctttgacatcgacaagacagaccacatcgacgcctgcctttcagtcatcgcgcaggccttcatcgacgcctgctccatctctgacctgcagctgggcaaggattcgccaaccaacaagctcctctacgccaaggagattcctgagtaccggaagatcgtgcagcgctactacaagcagatccaggacatgacgccgctcagcgagcaagagatgaatgcccatctggccgaggagtcgaggaaataccagaatgagttcaacaccaatgtggccatggcagagatttataagtacgccaagaggtatcggccgcagatcatggccgcgctggaggccaaccccacggcccggaggacacaactgcagcacaagtttgagcaggtggtggctttgatggaggacaacatctacgagtgctacattggtcctgctgccaagagccccgtgcatccaggcggccaagcacaaactgggggagaggaggccgccagcccggaggctgcagcccagaaactctacctcatccacactggtgcagggagccctccttgaactgacctttgattggtttctgcttcaactaccaaaatgttatctccacttccccctcacccgtagaggatcctggccacagacagtttcaagtagtgtcagatttttgttgcttgggcggctgttggtagagtgggcagtgcccgcgccatggggtgctctgtgggcttctccaggagcagggagggtggaggggagggatggggggcacaggagctgggagccccgtctccaggaaaaggagaggggttaagatgcaccgaggctgtagctgggctacttgatcttgctgaaagtgtttctaaagatagcaccacttttttttttaaagcttttatatattaaaaaacgtatcatgcaccaactgtgaatagctgccgcttgcgcagaggacccggggaggggtcccgagaggctccccatgcaacactggaaatgactgttccagagagcgggcagacctggcagagcgcccctggcgcctgagactaccacccactccgttcctgccagaaacgaccctctgtggccgatgggccatgcgggcccctcgcagccaactcagccagtgttgggactggctcagagcccatgggggctggaggggggcagctgggactctggaatcttctttataataaaagccttacggacaaacctactgtgggctccagcctttgtcctgagatagccaagcgggagaa

SEQ ID NO: 829 - protein, 1830 aa, Homo sapiens
MLNVAANHPNASTVGLVLPPAAGAGGSRLLVGATYTGYGSSFFPRNRSLEDHRFENTPEIAIRSLDTRGDLAKLFTFDLNPSDDNILKIKQGAKEQHKLGFVSAFLHPSDPPPGAQSYAYLALNSEARAGDKESQARSLLARICLPHGAGGDAKKLTESYIQLGLQCAGGAGRGDKRLVSVFPARERLFAVFERPQGSPAARAAPAALCAFRFADVRAAIRAARTACFVEPAPDVVAVLDSVVQGTGPACERKLNIQLQPEQLDCGAAHLQHPLSILQPLKATPVFRAPGLTSVAVASVNNYTAVFLGTVNGRLLKINLNESMQVVSRRVVTVAYGEPVHHVMQFDPADSGYLYLMTSHQMARVKVAACNVHSTCGDCVGAADAYCGWCALETRCTLQQDCTNSSQQHFWTSASEGPSRCPAMTVLPSEIDVRQEYPGMILQISGSLPSLSGMEMACDYGNNIRTVARVPGPAFGHQIAYCNLLPRDQFPPFPPNQDHVTVEMSVRVNGRNIVKANFTIYDCSRTAQVYPHTACTSCLSAQWPCFWCSQQHSCVSNQSRCEDNPTSPQDCPRTLLSPLAPVPTGGSQNILVPLANTAFFQGAALECSFGLEEIFEAVWVNESVVRCDQVVLHTTRKSQVFPLSLQLKGRPARFLDSPEPMTVMVYNCAMGSPDCSQCLGREDLGHLCMWSDGCRLRGPLQPMAGTCPAPEIRAIEPLSGPLDGGTLLTIRGRNLGRRLSDVAHGVWIGGVACEPLPDRYTVSEEVAVGAKDRWLTTAPPLRIVCVTGPAPGPLSGVVTVNASKEGKSRDRFSYVLPLVHSLEPTMGPKAGGTRITIHGNDLHVGSELQVLVNDTDPCTELMRTDTSIACTMPEGALPAPVPVCVRFERRGCVHGNLTFWYMQNPVITAISPRRSPVRLSGAAGALIGFAVPRSGGRTITVAGERFHMVQNVSMAVHHIGREPTLCKVLNSTLITCPSPGALSNASAPVDFFINGRAYADEVAVAEELLDPEEAQRGSRFRLDYLPNPQFSTAKREKWIKHHPGEPLTLVIHVSTKGAGKEQDSLGLQSHEYRVKIGQVSCDIQIVSDRIIHCSVNESLGAAVGQLPITIQVGNFNQTIATLQLGGSETAIIVSIVICSVLLLLSVVFVFCTKSRRAERYWQKTLLQMEEMESQIREEIRKGDGFSGRSRLSVCPPGFAELQTDMTDLTKELNRSQGIPFLEYKHFVTRTFFPKCSSLYEERYVLPSQTLNSQGSSQAQETHPLLGEWKIPESCRPNMEEGISLFSSLLNNKHFLIVFVHALEQQKDFAVRDRCSLASLLTIALHGKLEYYTSIMKELLVDLIDASAAKNPKLMLRRTESVVEKMLTNWMSICMYSCLRETVGEPFFLLLCAIKQQINKGSIDAITGKARYTLNEEWLLRENIEAKPRNLNVSFQGCGMDSLSVRAMDTDTLTQVKEKIAFCKNVPYSQWPRAEDVDLEWFASSTQSYILRDLDDTSVVEDGRKKLNTLAHYKIPEGASLAMSLIDKKDNTLGRVKDLDTEKYFHLVLPTDELAEPKKSHRQSHRKKVLPEIYLTRLLSTKGTLQKFLDDLFKAILSIREDKPPLAVKYFFDFLEEQAEKRGISDPDTLHIWKTNSLPLRFWVNILKNPQFVFDIDKTDHIDACLSVIAQAFIDACSISDLQLGKDSPTNKLLYAKEIPEYRKIVQRYYKQIQDMTPLSEQEMNAHLAEESRKYQNEFNTNVAMAEIYKYAKRYRPQIMAALEANPTARRTQLQHKFEQVVMEDNIYECYIGPAAKSPVHPGGQAQTGGEEADEAAAQKLYLIHTGAGSPP

SEQ ID NO: 830 - DNA, 83493 bp, Mus musculus
  misc_feature (1)...(83493): n = A,T,C or G
aacaaatttgacaagatgtgattacaggtaacttattacatgctttggataaatgttaagtagtgaaggaaaacaggtacctctttctctaggactcatactgaagggaagaaacttcttcatggacagattcatctaagagcccttgggcacaggaagtgtctaaatgggattctgagaaggaatcctataatgcaaagggcaatcagggttaaataaaatcagctccaacctttatcttacagcctttgagaaatcaaagaatttcatgtccctacctctgtcaccaacttctgtggcttctgtcctgagcagggcaaatggactctgaattctgtcacagtgccttaatcactttgccatctcctgcccatggttagtcagtgctgaccatcatgtgacccagttcctgtctttggtttatttatgtcctcaaagcagttgaaaagtgttggtgtgtgtagaaaacaattaaagtttgggacaatggagagaaactcatataaaatataagtaatctaatactgaataggcattcttgttctaaaagtaatttgatttttttatgtgtgtttgttgtttgattctcaagacttagtttctcagtgtaaccttggctgttgtcctggaactcgctctgtagaccagactggccttgaactcacagagacctgcctgtctctccctccaagtgctgggaataaaggtgtgcgccaccatgactgatcatattaaaggttgttcttgctgacatcatcccatctaataaacacagaaggaagggtctgcatcaactttcaccatggcaactgcttcaggtgggaatcagcaatagttagcaaaagctatgtgttttatttatttatttatttatttatttatttatttatttatttattttgagacggggtttctctgtgtagccctggctgtcctggaactcactctgtagaccaggctggcccaaaactcagaaatctgcctgcctctgcctcccaagtgctggaattaaaggcatgcaccaccactgcctagcaagctatgtgtgaaagtataagaggtgggctatttataggttttaaaatacacaactacaaagggaagaacattcactttggtaaagctatcaaggctgtagtagataaagacagaagaactactttaggttaaagaaggacgaatgccatgaattatcctggatagggtcttagaacaacaacaacaacaaaaaaatcaaaaaacaaaaaacaaaaaatccaacccccccaaaaaaccctacaaaacaaaacaaaaactccaaccaacaaattaaccaaaaccaaaacaaaaaccaaaaaaccaaaaaaaaaaaaaaaaacaaaaaacaaaaaaaaaatcacaaaacctaaaccaaaccaaatcaaaaacactttaaaaaaatataaagaacattagagagaatgttctggtttgaatgcaatgtataaggtagataatcaacactattgtgtcagtatcaattcctgatttctgtcatcacgaggaaatgatggaagagtatgtctcagctcagagaaactactgtgtactgaagtcatttacagtggagaaggtaaaagggcaaacaaaccgcacccttaacttagtctcaaaagctttagaagaacatgggtagatgggaattctttataatattttgccattttcctttgagtctgaaacgactatgagataaagtagttccacctgtgcatgcggtgactgtgcacttctctgctcctctgcttgcccctgtcaccgtggccgagcgatggccctagagattgtcatactgctctccctgtctaaatgaccttgtgctgttgtttgagatgagccctctctcttgttaggctgctgcaatgagggcacccaggagcttccttcactgattcactcacatctaccgaaggtgtagaaagtagaatagtgcagagagaagaaagagactgctcatagggtgtgtgtgtgtgggggggggaagaactagcagggaaattaaggatggaccatacggggcatctggcaagaggagaacctcccgagcgtggcatgcaaagttaagaagcagaaaagaagatccaagggggaagaaagatgtttgggaatgggactcttcctggccattttccctttcaccacactggtcacttttgtgaatgtctggtcctaattccttggccagatagcagaactagtgtggttgtcagtacagaagagtagagaacatctgggctgatatagagacactcaaagggtatttagtggggtatatgagaatcaaaatgggtaacaatcacagtaacagcagcagctgatacaggattcccatcttgtccttcggactagtccacaaccttagtggctttcattttgttcaatctacacaatgtgatcagtgttcctatttcagagtagactgagacacaacgaggttaaggcaacggccatctgcccgctacagaaacaagcttcagactctaaactgaagcccaagggaatcccaaggaacccctttagacctagcacactccactcacgtttagctactcacttttatgaccaatcttagagatcatgtaactaagggctatgttattaatatccagcagctttgctgcacatgacctgtgctgtgtgagagtcaaaagggaaaacttggcttcagttttttattttagaatttggaggtcatttctcaaatcagtagaaactagtggtcccttctctgggcctgtgcaaagtggaagaccccttgatacctgctttttgatcttgcttatgccatcattttctggacatgtgtctcatgaagagcaaggatgtttgattatgcacgcgttgacccctgacttccttactttccctgacctctaacaaaccaccttcccccgtgcttcctgcccgtcctgcttctttttcccctgaatagtgctgagtcccacttgagggattcagtatgattgaggcttcctttctcatctccatccataactgttgtatcatttattttctcattgctaggacaaagtgcctgagaagtggaacgtagtttctttcggctcacagtccttaaagcccagcacggcaagggaggcatggcggcgggagtgtatggagcctggtcacgtgggatctgtgatcaggaatcagaaagacagatgctcctgttgctcattcaatctgggacccgaggtcatgggacagagccgctcacatgcaggatgggtcttccctcctccgttaagcctttcccggaaacatcctcacagataaacacagcagttcatctccagggtgcttctaaacccccgtcaaggttaagagtcacgacggacttctacatcagccctttctcttttgaaacactccttgcttcagtatagagccctgagggatgagcagaacaggcctgatccaataactgaagataactctttgatccttcttttgttctcatccttctcttccctctccagcaatctatgatggcaaaatcagagtcccagaaagcatggaccttctccgttgggttgtggatctgctctccggaacgtactttgggcagagcagggcaggagaggcctggcagagaggatgaagcaggttggcccgtgacccactggagcttcatgggaaggatgaaattgtcagtgtctgatggcaagagaaaactgtggctcagaagggcactgctcacctcccctggttagagttcccctgtagccagtgtgggggaggcacctggcgaggtgtagggcacagtgggtcccatagcccctgtcctcagccctcttcagagccttgcctctcacctgtgaggtgatggagaaggagatgggagatgggtcaaagcagggattcccttgggggcctctctgacttctttcttattttaggaggagtaggcagcaagttccagaatgtctggaacatgaaaaagagacttaataaatacactttcaaacccgagactcagctcctggccaggagacatgcaaacgttttaatatccttgttctgcatttacttaaatggaaacagcccgtggtatttttagctgctgtgtaatcaacgtaagaaggaaaggggaatgtatactttttttccttctcctagttagagtaagagaatgaattgctcaattctcaacagagtccaggaagggaggaaaatcccggagtcccattgattggctcctcctctgtcatagccttgatttaaacccagggagggaagcagagggagaagatattgagggacggatcggcaacgaagtctccagtaccaggaccagctcacaggaggcagggggattggaagtggtgcccagcagcctcccaggtaagagtgccagctccttgaggctttatcatcgattgggagggggacagtcagtgtggggaagattgtagactgacgtgcattgttgcaaatctaggcaaggcaatatagattaagttcaaactatctcccagggcctgtgaatcatgtccatagctggtatcagactctgccctccccaagccaggagacaccatccccttacctgccaagctcagtgcgtggggcaccagattctacgcggagcagtgcattttagatgatgtgttttctttaagtctatttgtgtttcttcttacacagacctcttctctccgtgtaatctcttatgtgctatagctcgttgttctcttaaaacagagctttcaatctggctgtgtttaggaagctatgcctaactttcccctctttgagatttttgtgtgaaccgatgaagatgatgcttgccgactccctcgaaggggctcattgagttgtctgtgttttaatcattacatgacagaggagactttctcttcccctactgcactatggttaccctcacagtgcctcaaagcgggcattttcaatcacttcaagagtgatgtgggacactggtttttgaagatctgagtttttatttgtaatttttgtagggtgggagagggctgggtgaagagggtagagggagagtcttcaccctctaaggaccagattagcttatataagcattgacagaatcataacttcaacatagaaatatcagattatccacatctgtgcaggtaagccatggctctgcccagttgcagactcagggtgatggtgacagtgtcaagagaagactcaagaggagggagagagtatcaatacccgggtcctttccctcagaaacaaaggagaaacagggcctgactttctctcatgctactctgaattcttttaatgtcttcaaagcaaagaaactgggcagatgatttccatcccatcttgtggcttctggctttcactctggtgccgtgctgtagggtagaccagctccttctgaggaaattatacccaggcccatggaaactctgccccttccagagccctggctcccataggctctggctgcagacatgaggtcatagtttaggttctgttggagcatttggaaccaccagtctgcaagctgatggtgttgtggtatcaggcctggctcctgatggtcagcagctcggcctggttccaccccagacgactcaggcagatgccagccagctgccatctaaatatgtgcatagcccatgtaggcagaacggcgcaaattcctggaaattagcattggctcttcagcttgatagaaggctggaactctaaagttgtttcagtgtgtggaaaaccacattaaactgaagggagaaattgtaacttctcattatgcatctctcctcattagcactcacctgaagcaagtccccatcgtggctgtggagaatagaaataattgtaggtcagcaaacactttatcattttgggggactcggttggtaaaagaaggttctcaaatttagatctcgtgtctattttatctccccattgtgggtgagcctggactatggaggctaacggaaaacctttctgtgaaaaattagttcattcccacagggataaatgatcatctttgcctattgttcacagacagcttttaaggctcttgacatagaaactggtatataaggagtgtttagaaaatggtagctactattatcatcattcactgggccctttgcaaaaggcagattaagatttagttgataaaaggaaatgagcctgtcgaaactgctgagaaagtagttgggccccagggctgagcctcattcattgtcctttctagtgggtaggctacttatatagtcagaggggttgttgcacaaggtgtaagaagtcttacaaacactccctaggaactcattcaatagacccagtggacttggagcacaggagcacacagcctggaatgtgctgtcatgtgctgttttatagagccacatcttcttcatcctcgacctgtctcacatcctgtacagagccacaactaagaatgtttgtatgcatttggctcaactggagggtgacctagaggaaacagtgctgtctcatatcctagattctcttgcaagctgaagaatgggaaatggggacattggttgtctgagatctcacatccaggatgggtcatgcctcagtaggttgtttagctccttgagaacttgattttctagaccaagtattctagtcacaagactcagaaccactcaggggccaggctgtagcacactggcaaactatgttcaagaagaataaaggaaggagtgaaggtggccagtgatatttgtgacatcagggcatccttagccacctactctttcttttttcttcattgtttaccgaggtctaccctattatttggggagagaatatcttcttagtgactctactggaaacccaccgtaatacagcttttctaagacccaaagcagtacactcatttgcttgtggttaaccattaggcaggatgaggtcatgaaggaacagagaaaggcctgaatttaagtacaaagctcgttgccagtggctagaagctggcaactgctctatttgaagtaagtagcattttttcctgactcagtgtgtgtctttctttagagaaaatgaggtgacacaaaggccatacagctctaatgagaagtccttgtgaactgagaaacattctctcctcctaaggcttggttgacatatgccctcatggatagaggtcttggtagtctctgctgtttcctgccttgtggtgggaagtggtgggaccttagctttctgtgaggaaaacacaattcatcttcccaggcatcagcttgctctggctgaaggccaggcaagtccaggcttccattcctgatttattaaggttttgttgaatacctggtataccttggctttcctttcctttcagagcctctctcttgaaggaaatatagcaggaaagaggatatttggtgtttttctttccacatctacagtttatattgcagaaagatgaagaatccagacacaaggagtggataagcctggtgtgtgatcccagctctgctgtttaactagttgaatgccctgaccaaattacctaacattttgagtacttatgacaaataatattgttgattgactgtcatcattttgaggattaattgaagctaatttttttacttgtttggcccagtacccacaatctaataatcacacacaaatctattgtcccttattatgtaactcacacactatttggccaaagctatgatgggtagctagaaaacaggagggacctgtgtcatcctagcctctaccatccatgagctgacaggcattctgggcagggaacagacttggatttctacacggtcgattttggctagaaattaacaccacaggagtggctgcagctatgaataagaaagagcatagaaccctgtgacgctagtgcatctcaggcagatccacaggaccatccatctaggttgcactgagcagtcaatccagagcaaagcctttctcatggtggccaccgtggcagcagttattacagatactgtctcagtcctcctcaccactcagtgctcctcctcctgcaatgaggcacagctttagtgagacagtagttcctggaggacccctggtttccatggtttcccgtgtataaatgccctttgcctcacgaattcccccagtatctctcccactttccatcaggagcttcgtcacaaagaatcatctttattcagaaatgtctcaactgttgtttgtcttggggaaccgtctgtggtgtgccatgcatattaatacagaggatgaagtcatgccttcctcatgctgctcagcaaggagaggctgtctcctgccacacgctggagccagagccagcagcttcccttcttactcacacttcacagtgctagatagattgaggatttcccctgctcgtcttctttctagcaatcactctgcccaggaaaatctgagctcagcgtgtgcaatctgagaggctgcgattagcaaggacatcttgttacaattcgggacgggcgacacagagggttccttcaagagcttctgggccttctcatattccaggcttcaaaagcaaacaatgtaagacagggttttggacagcgcttctgtggtttatggcaggagttccccattttttttcatttgttaggaaactcctttggggggaaaatctgcatcccatttagggctcaggagcagtgagcatgcggaccgtggcactgggtggtaggagtgagcaaagaagttgacttggttggctctattgttgcccagaggggatttgcggtagtacagaccatgccttgcaatacccacagtaggtgcttgagtgggtgcagcagatctcagaagcgaaggctctattgctcactgagttcaaatctgtggccttgcacttggtagtcacataaccagcagcaagttgttatggtcgccactccttagctcccaacttcagagtcaagcggacaatttgttttgttttatcactaggataaacttttgaacgaatctctattccgtatttctattccacacccaccttccaactccttttactggctcccccattccaccttctcactcacatccctggctttcctatttaatcactttcctgaactcaaatcctttttcttgacagaactcccatctactccggtggacagcctttcttattccctggatcaggttgctaggagctgcataatatgaatgtctgtgatgggtttgtgtgtgcttggatgtagtcctttctcttctctcaacttctatcactgttttggcgtttccaggttgctttctgaggtacagtattatacagggaaaaggatacccctctaccaaggccctatcattaaattgcctctggctagtcaggtacccatctctttgcctgccactcaattccattcattctggcctcaccgaccttccaaactttgaggagatgaatggatgcttgctacccactcattaatggaatcctggcagtgagagaggcctcctgactgtcctatttcatctggagagggtcccggtgcctaaaacatagaaagagtttggaagagaactagtttcactgctattaatagcacatgccttaaaggacagcagagtaaggactgagtagcacacatgggtcatatgaagacccctcttctgcaacataactaaatggatatgaaatccccatcacacaaaatagctaaggtgtaatgatatggaagtgcttcttgcccccattggatcaatacacactgcacacacgtgttgaactacttactacactgtgcaactgttactgttgatcaaagacatggttgatattcaggctcctataaacactagggactagggagatgaaaggctggcttaggcaagagaataggagccctttttgatactgtgaacagtgtgtggatgcttaggatctgttaagagagggtaagttccattcagccagccctcatggcattcttggttgttttccccttctggatctaggcctcctggagtatccctttatccaagaatgggtctctgggggatgctcgccttccccctgggatttctgcttgcttctgtgctcctggtggcttcggccccagccactccagagtctcccggctgcagcaacaaagagcaacaggtcactgttagccacacctacaagattgacgtgcccaagtctgctctggttcaagtagagaccgaccccacagtcactcagcgatgatgggacatcactcttggctcccggggaggatggagaggagcagaacattatcttcaggcacaacattcgtcttcagacaccgcagaagagctgtgacctggcagacagtgtccaggacctgctagcccggatgaaaaagctggaggaagagatggcagagctgaaggagcagtgcaataccaaccgctgctgccagggagctgctggtgaggctaccatctggtattcagtctacaaacacttagtgtgtgcttatgtgctgggtcctccactagcctcatgggtgctgtgagatcttggtgcatgtccctttttgcacttggcctttttttcaaggtacaagccatacccctcctctttattctctgatacagctctagaggcgtctggaagcctaggcagggagggttcagcaggctggtctcccagactaatgacaccagatgggaatgatcccagggctgttctgctgacaggccaaattgctattgaggagggaagggaagtgaaggtgtaaaaagaagagaaaggaagccgaatgcgatgttgaggaaattctcgaagtttcttcaactgtctaacaaggctggttttatcagctagcagagttctgcttactagagaaggtgtatattagagccctggtcaatagtaggtattcagaaaactgttaatgctatattagtaataaagtacaaaggacaactttttttttttcacctctaccgtttaagaacatggatgcccaggtgacaatgagtggtgcttttttgttgttttggttaagagtacccctaaacgccagatataaacctaggaaccagggacaacacaccactgtgaagaannnnnnnnnnnnnnnnnnnnacagcacaaggtcatttagacagggagagcagtatgacaatctttagggccatcgctcggccacggtgacaggggcaagcagaggagcagagaagtgcacagtcaccgcatgcacaggtggaactactttatctcatagtcgtttcagactcaaaggaaaatggcaaaatattataaagaattcccatctacccatgttcttttaaagcttttgagactaagttaagggtgcggtttgtttgcccttttaccttctccactgtaaatgacttcagtacacagtagtttctttgagctgagacatactcttccatcatttcctcgtgatgacagaaatcaggaattgatactgacacaatagtgttgattatctaccttatacattgcattcaaaccagaacattctctctaatgttctttatatttttttaaagtgtttttcctccctcccaccccccacccaaaccccagccagcagccccactttggaagtttccctaggaagggaagacgacattccaagaggcagaaggcactgcatcggctgacctgacctccagcttccccgagctgtgtaggagagccctggccaaatgccctggctcactcatcactgagcctaggctaccctgccatttctgtacacgcagttcacaaccagcagtgctgggtccagctccattctccaggataagatcaagtcccacctgcctctctccctggagcactggaacccaacaaccaatgaggaccatttaaagtccctttatagaaaaacaaaacaaaacaaatcaaaacaacaacagcaaacgctagtcatcactattcacaaggaaggaaccctcttttaggcaaacaaaagagaagctgagatttggctcaagtagaaaacattttcctcacaaagaccccataagatccagaaaatgtcagccacctctgactagtctccaaggaaggagacctccaggcctcacccatgtcttcttttcctggcagatctgagccgtcactgcagtggccacgggaccttcttccctgagacctgcagctgccactgtgaccagggctgggagggcgcagactgtgatcagcccacctgtcctggggcttgcaacggccacgggcgctgtgtggatgggcagtgcgtgtgtgacgcgccctatgtgggggtcgactgcgcctacgccgcctgtccccaggactgcagtgggcatggcgtgtgcgtgcagggtgtctgccagtgccacgaggacttcacagcagaggactgcagcgagcagcgctgtcctggcgactgtagtggcaatggtttctgtgacactggcgagtgttactgtgagatgggctttactggccccgactgttcccagggtgagagtcaaaatgcacgttgagggccacccttccttcctaatccgcggtctcagttgcattaactctattacaggttgccttacttggagagccaaacaatagagctggttggtggggagggggcccccaagtttcaccaagccctactggaggaactatacaattgatggctgctgggtgtggcttctagtagggttacccacagttcagtgggcaggctgcatacccaagggcaaacaggaagcactaactggattaaccaggaatatgcaaaaggaaagaaagggaggcacggagggtgggaaggggaaagggtagagggaggaagtacaagagctgagaaggaatgtgttgaggggaggaagtgaggggtagatatggttgagatacattgtatccctgtatgaaatttccaatgaattaaaaaaaaacataaaacaataaagtcctgggtctcctgccagagcttgccacatagaggtccctgggaggattctgaaaatatgcatttgtacagattcctcaggtggtcctggtggtgtcggtggtggtcctgattctgatagaatgcacatgttccatgttagggcaaccaaacagtaacttccaggggaacggtgtcaagaatggtgtgataggtaatctgcaccctgcaggtctaccaacacagccttaagtgaatagtaggtgctggagaatattcatttggccacccagtcttaccctctccaccctcacctcctgctcctcttctgcccacagtggtggctcctcagggcctgcagttgctcaagagcacggagaactctctgctggtgagttgggagccctccagtgaggtagactactacctgctcagctactaccccctggggaaggagcaagctacaaaacaggtccgggtacccaaggagcagcacacctatgacatcaccggcttgctgcctggaaccaagtacatagtcaccctgcgcaacgtgaagaaagacatttccagcagccctcagcatctacttgccaccacaggtgaggaacatcagatacaggctgtctgcagggacagtaactctctcctgttctagttctgatctattgctggttccttctggctggacccaaggtgaagggtctggaagacttaagtcacagagtccccaaaccttggatacagaatgggatggaggatgcaggagactggctagattggcttgcagggcatggtcaccactgcatcagcagacaacaccagactgataaaaagaatcaacatcacatgtatgtcactaatgcttcaggttcatgtctcagtgaacatccagggaattaaaagaatagggaggggtttatgacttgcatcaaataaggaaagctctgggaacaactctcgaagcagtgttcttctccaaacaaagaaagcaggggaggggtgggaacttctattcagaaacgcatacagcagattgccctgtcacacacatgtaatgacaagtacattcctgagcattgaaaaaaaaaaaaggctagggtcttgggagtccttagaaaccaggttaaaaatggttttccacgtaaacactaagcacttataatccgaatactgggaaggaggagccagtctagcctactcagtgcgctccaggccgatgtgatgtcctgtctcaaagaccaaggtagacagatcttgagaaagaatcctctgtgcacctgtgtaagtacaccacacacacacacacacacacacacacacacacacacacacacacacacacacacacaccatggacacgcacagcggctaacattaatgtgtaaagaacctggacttataatgcaaatgatgattcacagtgactggaccgttctgactggctccttgttagttgctttaaaggcctttagctgcaaatccaccacactgacaccaccaccatcacagccagcaccatcagctgtactggcacacgtctgtaatcctagcccttaggagaaagacacagcagcttgagattctgagagaccctgtcagtatagtaagtcattttaaaagacggctttcttcctctagctgtggggaggctacactatgtagcagtctagcagctaacactttagaaatccagtttttcatgaatattcttttttaagtttctattattactattacgattgctattattattattattaaatcttttttacagtctagtcattattgccctcagactgttcctcatcccattccccccactccccgcatcttcaagaggatgtccccacctccccatacccaccccatcagacctccccactctctgggccttaagtatctcagattaggtatgtgttctctcagtgaggccaaaccaggcagtcctctgctgtctatgggtcaggacctcatatcaactggtgtatgctgcctggttggtggctcagtgtctgagagatctcagggtcagggttagttgagactgctggtcttcctatggggtcaccctcctcctcagcttcttccagcttttccctaaatcaatcaaaggagtccacggcttctgtccactggttgggtgtatgcatctgtatctgactgttgggcctctcagagggcagccaagctaggcctctgtttgtaaacacaccatagcatcagtaacattgtcaggccttggagcctctccttgacctggatcccgatttgagcttgtcactggacctccttcccctcactcagtctcttctccattttagacagttcttttagacaggaacaattctgggtcagagtttttgactgtggcatggcaatcccattcctccacttgatgccctgtctttctactgggggtggactctacaatttccctctacccactgtagggtatttcgtctaagcagttttgctgtttgagagtttggatcagtctagttgtctgagtgactgattccctctattacccaagggccccccaggtaccaggtgctgttctaggagctgacaaatgcactgtcctaccctactctaaatccctggggaagatctggatgggtaggatgatggcctgtagtcatctttgtggaaacagaaggctgccttgcctgttttgttaggaatgtggtgaactatggtagatcagtatcgtaagggctttgagaggcgtggcaggattttgttagcaagcactaaaaatacccctgcagttgaacaagttgggttttgttgttcattttatcctgggaaaatacatcatgggggaactccaggggtgtctcggtgagaatggaaggaagggcttgttctaggatatggggtttaattagataacctggggaacagggatttgctttgattgggatatagccaaggagtgtgtgttggggggagaagtgggtaactgtgcttgggcatcttagggactcttctctagaaagagggctcactagaagcagcctaagcggtggttggaaagaagtaagcaccatgtctgttagtcagaagaggggacattttgtcatttctgtggaaaatagtcttgcttttgtctgtgtttagacacggtcatagaatggctttgtttttgtctcagccttgcatgtttgcaaagtgtccttggctaatgctaatgttctgtggaatgacttatgagcacgggagaatactaagcatagctatgagagccaggccaaacttctgaacaataggggctgcttttgtctgtagctacatctgctacagacaggatagtgctgaaactcccagggaagggctggaacatctgttcgaaagcctcagcaactcttcttagaggctttctctgagaatttgtaagatcttgctacaatgaagtttgtctttctgtctaaactgattcaagttcaaatctgtcttccttgcacttcagggagctttagacctactaatacgtattcccatcttgaacattctccttaattccttgctttaaaaaaagtgtgaatatttcccaattcttttaagccatgtcagacctcttctacaatcctgaagtcaccttcattaatttcctattggcttttcatttggagaattctttctttgaaagaagtctcaaagcagaggctgggcctagcaagtaggggctacagtgagaagaaaggctctgagaggttcttgtctatagaagagagaatcagagatacaacagagggaccttgggataactaggttcatactctgcctaatataaaagttcattgtcatacatccttgatgaatggtcagccacaatgggtggcaatgcctccaaggtaaagatgacaagatcttggaagggggcaaggctgggaatcttggaggttttctttttctttctttccttttttttttttcctgtctcatactgtaagagcaagttctatcagcctgggatacagctattgtaattctaagtgttcacaaaagctctcagttgaccccttccaaaagtttttcccatagagtgccatccatttgaattaaaattttagggttgttttccaattggcagggcaaatgttcagccctcttattagtcttattgtgaacaaaggaatatgatgagtgtcctttacaggacagagcaaaagggcagcatgaatacactggggaccttgtgaaagtattataatttgatagaaggttcaaagaagatgaaaagaaagaccaggttatacatcatctgctttgcaattttgttttgggttaatgtacagtgcacatgaggaccatgcgctctaatttgagagttagaagaaggatctagttgcattagcaatgttatatttttaaaagttgaaatatattgccccagattttatatgtatatattcctgtggctagtgcaaaggacagggactctgtagctaaagggagaacacccattaagagcagctgagccttgggctgggcactttggatactgccccaagaggagcaactctgatgtggtcagagtctgtatggaaggatgagatgcgtggtgcatagtggaatgagccatggagtctttctaggaagagtctgccttccgtggagatggccaagagcaacagccagctgttacctgggttagctccaagattcctgttaaagactgtgtctttagctgaagccagctctaagtgtgtcaagaaagaggactgacttagtggccaatgtactgtctcagacctttgtgacttctgcactcaaccattttctcttgtcttctctgatttctgctctagatcttgctgtggtgggcacagcctgggtaaatgaagagactgagacatccctcgatgtggagtgggagaaccctctgactgaggtggactattacaagcttcggtatggccccttaacagggcaggaggtgacagaggtcactgtgcccaagagccgtgatcccaagagcagatatgacatcactggtaagagtctacactgggagattccagatgttggctgcagaagcaaaggtggagggagacagtgtatcctgggtcttaggaaccacactggattccagactcctagatataagcctaccctggtggcctggtgtctctgccagcatttaagggctgcaatcccaggacacttcatttacaatgtatgtctcaagtgtccttccaagtcaacatattttttgaggtcctatgtatattttaagatgtatttgatggtgtatacatacttcttttggaggaatattgggatagactggggtgggaggaagatatatatatgtatatatatatatgtgtgtgtgtgtgtgtgtatatatgcatatatatgtatatatatgtatatatatgtgtgtgtgtgtgtgtgtgtgtgtgtgtgagagagagagagagagagagagaatgagagagaatgaggaagttgatttggtgagaatcatgacaagaagggttgcgttatccacaggatatggaatcctttcttagatgactgaactaagtctactaagaccaggaactcagaaaataggaatgcagggatagaccaagctttgtaatacttgaagtttctacacttttcaaggacttctttaagaacagtggtacatgtacacagccacgaataccacaggtcattagaagaagccatctaaacgaaagatcctcaggctcattagcctcatgttccatcctctgggtcctcactctgctgtctacctcctcagctctgttttgagagaagagctcgcagctctccatctttgtggagaggagagagtgtgtgggcttcatggatgcgactgtctgttttcattttactagtggagtctgaatagttgtgtcatggggaacaaccacttaagttgtttccacagggagataacttagcccagattcccttctttcttctattataagaaaaaagttttgagtgaaactggttgttaggagctggaaaacatttggactataaataaaattgtgaagtaagtactcagtagccaacaaaggacaggagctccaaggactcgatgccatctgttccccaccacggggagtctaccaatcccaaggcttgtcacctgccttgacttttagctttggggttagcataaatcttacccttcataagagaatccaggtagaagctgagtgggagtgggtcgggagcctgtcttcacactcatgttggctgctcttttggttttttaggtctgcagcctggaacggaatataaaatcacagttgtgcccatccgaggtgatctggagggaaagccgattctcctgaatggcaggacaggtatggagatctcatcttcacattttcagatttttcttgtctccgtgtgacagttctaggatttccatggagcggtgctatggctgcctggatgggtgtctatactgaggggcagaagaacagaagcaaatctctcccgtttcacttcttttcatgtcctggggaaaaacatacctgggatcttggagtcacggggagatgctatccctgatgcctttcttctgactttaattgcttcaatccctgaatcaaattaccgtctcaaggcacttaataggcatagagaacttcattccccgaggacagatgaactagactatttgtcacattgtatttgttcctaatatccacactcaagcagtctgttctgaagtgggagatgatgtttaagaccctcccacgggagtcatggtatagttagcatttgtctatcaagaataagatgttgtgcagcggtaattggtcaaatatcaaccagaatggaatttgaacacattgtaggtttaaatgcatattgaactgtgcacatcctgcatagagaatgatgctcctgcgtacacagattgagacctggaagcgactggtgattggagcctgcaaaacaggaatctttccattttgagtttttcttaaagagtggcttcattctttccgttaagtcttagaagtagctaggtatggtgatatagtaatgacgctgaatggttcgagttagagagctgggcaattacaatgaagagctgtaatttaatttatgatccagacaagatggactgggtagtttgcctaaatggttgatgagacatttgagtgagtcagaaaatggcaagtacttcccttgcttctgaaagctttctctctggcttgattgagaggttatagatcaactgaaaggttgctacgtgccaggcagcaaatttcctcagcatttttcatgagttttgccatttagttctcacagtcagtctatggatgagctactactattatttctaggtcacatgcatacaaaaactaagacttgaaaacgtaaaggtcaagatcacccagccaggaaatggcaaagctgggttcgaaagaaggctgctcacctctaagccttggtgcttagtgacaggagcaaattgctgcttagttgatccttctgttgagagatgaatatgctttctcctcttacacaatcaacacaacacacaaccgttggccattggtgtgcatgagcgcgcgtgcgcgcgcgtgtgtgtgtatgtgtgtgtgtgtgtgtgtgtattattcctcttatatccagcaattctccatcagacaccaactgggtatcacacaagttaactcacttctaatagtacctattaaacataccagtagatttggactgaagggtcagaatttaaaaatgggttcaggaggaaactggaggactgccttattagaatttgaaacaacatcagtagggaggccagttgtggacctcaacagccttgggaggaggtgggtagagaagaggaagagagtctttttgagctctggttgaagagaaccggcatattcaacagtgcacgctagcaggaagctgcatggtcgaaggggagaggtgcttcagggaacaatgagaaagctcagaatgtcagatgttggttggtattaaaaaataatttaaagaagagagaatgagtgaacgaacaaaataggaaaagtttttctttttttagtctgaactcaaaaagcaggcagagatttagcagagcctgattctctcaccaccttatcatgtgtttggctgaatcaggtttcctatgggtaaactggtcaggagattgatggggtccagtggattaacgtttaggggagaaacaatagcatgctctcatctttccagtccataagaaagtcaatctccacctagaacaaccagggaaagaggaacctcagcttccattcttttgaccagaagagtgtgttatgctttcccttaataggattcagggaagccccgagacctccatcttttcatgtgttattttaaaccccaaggaggttaattgtgaagcttcccttcctaatgttacccaggggaaacaggatgtagagcccaaagcatgatcaggagggaagatccaccgtcattggcctacaccacgactaatcctggtaacacaacttctacttcttgacgaaagccttttatagtcacattaaatgtcacagcctctgagttcttacaacaattaattgcgtgtgccattgaattggtagttaacctttcaagtatattatcccaactagactattagcatctgagaagtgtttttattgtcaattatatcctaacatcaggatgagacacttcactggatctcaaataaatctagggtatgtgcactactaaaataaaaaagaaaaagatcctatcgtttctgaggtcagggaagaccatgagttaatttaggagattaaaaatttgttttctccaaattttttgtttcttgcaagctgagaaagagcaccaggatttaagagcagtgtatgcgtacgcaggaagggaatgtagttcagttattttccacttaacaagtcaaccaatggaacttgttaaaacaaaactcttaaaactgaagggtctccaaataaaagggtttattgagctgttacagctgctagacaggaacaaaataaaacaaaacaaaaccctgaccaggttcttggacaagttcctttgactattagcaacaaagctaaatagtagttgaaactatgtgagtgggacgcagagagccaagaatacatttataaaatcctgggaaggaacacgtatgtgcataacactgagtctacactgacaatagataagagagatcagattatcacggacatcgggagatggaattccagcccataagaatgtagcttgaggaattctcccaagaaacctctgctccttccgctacaatcaggaccttgaattatgctggaggaaaaaaaaatgaggacaaaacaatgaagcaaactaggctttatttaggaaagtagagaacatagtgaggggacaggtataggcttctcaagagacagagactaacaaggatttaacactatctacaaaggattttgaggtcagactggtcaaagaacatgatcccgtatctaaatataaaaatctaaaattaaaacattgaattaaaatattctagtatacttattttttaattcaagaattgttttactcgtcaatgagattataaggtgttttatgagtgtactcttcaggtttatgaatgagctaaggggttgctgagaagagaagtttaagtcaaaaaggtcaaaggaattattgctgtaccttatatcaaaacaaaatcatgaccttttgactgtaaactctgttcacaacctttttgagacttttttttttcagaaaaaagaaaatcctcaggtttacagacaatgaacaatcggatatggttgaactcaaagggcactaacattttgtccttaaacattaagcatggttcattacttgttttaactctccagtttcatatatctctcaggaaaagtaacattgtctccctgcaggcaatctttacaatgtgggtatatgaagactgcatctttccattctcctatccccatacgtttttctgtctccctgtcctgctttgggattattcagagttgagaaaaccttggagtaagagagcaatgtttgtcgctctgaattattcagttttaatacttctggaagctttcaagtaggcagggcgtggtgattctggtcagtgactatatttaagacaaggtttctatgtagcattcaaaaccagggagagagatcttacctttagtttcacccacagttaataacagattcacttcctttaccatcttcctcccccctcctttccagtcatccctttatcaagctaatatcatgagaatgacaaggctgatagaggtcagtgaggaccgccagtgtgcggcaggcgggaagttgtagctgaaggaggcctctgggagcaggttggagagatcctgttttgtagatgaggctacagctgtagttcatctatgatttggcccaccaccgcagctactggaagattttgttgcatggaaaaacgacttaatgttccccacatcccctcctggcagacagggagggtttggtcttgcagggctggcttcatgcaactgtgtaagtgtgtggggtccatcggtggggtctacttctcattctcagatgccagcatctgactgctgtctttgttccaccctgtgaatgatcagggatcacagctctgtgaggatccccctttctagtctatgctggtaaagagttgagagaaagggggtggggaagaaggcgtcactgagttctaggctggttctgtctggcaggacttctgtggtttaacttctagatctagagtggctgtagacatagaactagattaaattttctttcctggtgttcataaccaagatctatctatctatctatctatctatctatctatctatctatctatctatctatctatcttctatctatctatctatctatctatctatctatctatctatcttctttctatctatctatctatctatctatctatctatctatctatttatattttaaacgctagtgttctttaactcaggtctagaagctcaccccacagaaaacccaatgttgggaagattagtttttcgtgttttctttcttttttttttttttttttgagacagggtttctctgggtagccctggctgtcttggaactcactctgtagaccaggctggcctcgaactcagaaatccgcctgcctctgcctcccgagtgctgagattaaaggtgtgcgccaccaccgcccggctggggagattagtattacagtgaaagaagtgctttattcagtgggagcttttacttgaaaatcacccaggaggctaaagagttgaggagttacagacataggaccagaccaatgagggagagacaccccctccaatgaagaagagaaaggctactgtctcttctctgaacaagcagagctctttcagaaagtcagatgcctcgtcttttcattgtctcttgttttcagcggcatctgatagggtttttttctttctataaaccctgaaggagaaagagagacttagcaatgtctaggtcaagttaatcctgcattataactttaggcaaagcatttctcaaatgatcaatatctctacatgcagagcagagtagaatctgacccaaaggttaaagcaaaaaagaggacagacacagaatgaaggcagagatagcaaaactttccatcccacatcaatcacccatcagacacgtgcacagaaaagcagagtcggtgttctcaggaaagagttcctcaagtgcttgaaaagcaacctaggctactgttagcattgcaacaatgcactgaatgctttctacagcaaagcaaatggaaaactacagtgtctttagctagattatgtaacttatgaggttagtgtttttttttttaaatgaagggcaaatgattctagaggatttgcttagggttttccttggcaactactccatctcttcagtgttctgaggctgctgagggaacacaagctccaaggctggccaggttggatctctcagtgcacatagacagttctgacgctaccaaaccactggcctgtgctgtgacaagatgttgcaggctaagtactgacaggggcacgttgtgggagtgagaggtactgctaggatgctggactttgtaggtgtgggtgggtcactttggagaggatgagagtcagggctttcaagagctggattgcactcctctctttgtgtctttaatcttctcttctcctttcatcaccattgctgagactgagctatggcctgggggtgggagtggggctgtgtcagcatccctgcctcacaagcacagagacattggggtaaggggtcagagagagaatcctctctgttgtatacatgtcttcttctgaacgatctcttagagcctcctgatgttggcattagggatcttcaggcttctgcatccagacaccccctctctcattccatggaactccctttgccagtgagatgtgtctagcacccctacagcccaagctgttttctttctctttagaattctccccaagttcttatcaactactcctatgttatttcaggttgcagtagcctttcagagcatagtttattccatctacaattgttaatgtttatcccacatagattgaagagatgccagtcacattggattggatccacctaaatgactccattttaacttatgatctctgaaaagacctcagatgcaagtagacaaagattgttagtgttgtgacagttgctagtatttattactgccgatcttacagaagttatctaacctgtctgggcctagcgtatacatactattctaagaggggaagactattagttttcctaacttgtgaggcacctggtgaatgccttgtgtttttaccatgggatttggtaactaatgtatgaaaagcaccatgatccttggtgtgtgcttggtaaatggcagttgacttactaaatgaaatatgaactgcctctggtaatggaacacatttcatcttctcttgcaaataaaacactgcccttatgtttgataaaggtgcactgtagctaaggttgaaaaatgggactatgtgaaattgtaacttctctctgaaaaatccttggctgagagaccaagaatagattgaggggcggggggggggggagggagagaggaggagaatttagctgctttagaccaagaagttgttttgtggatttttcagttaaaaagatgtagatccatatacagaggacattctagggtcatgtcttagcggtgttctgtttgacatctttatcagtggccttaacgaatgtgtattgatggcttgcttataaaattctccagtgtcaggaagatagacagaaaagtgagcatatttagacaaaagattaaaatataaatggaactttaagagggcaaaactaatgagtataaatgttggccaaggacattattaaacatgcatagattggagatggtgggatttaacatggaagtccttattctttgatgcatatcagaatcacttaaaagttttgtttatgtgtttactaaattattatatatttttagataaggctttactcactggatcagtctggtgttgaacttcatgtatagccccggtttatctagaactcatgtttctcctgcttcagacttctaagtgcaggaatgatgggcttgtcttaccacaaccaaggaggtgtgtgttatgtggtgattcttgtttctaatcccagcgttcagaaagctgaggtacaaggactgtgagttcaagccaggctgggctatatagtaagattcgctttttaaagaactctcataactccccaagcataaaacaaaaccaaccaaacaaccaaacaaccacaaccaaccaaccaaccaaccaaccaaaagtccctgaaagaagctaagcgatgctagggcttactctgcatttcttgaagtggaatctctgctggctgtacttggcagggacccagtgttggcagaaattgaggacacctagatagggggactcctgaggccacaggtacagggtgtgtcttcaggatacagttggaaaattgttttgaacaccaatgacctcaaaaaagactgctgactgtcttatttatttataattgccgaatgccatcctatattccctgtcacatacattgttgtgggggtaaataagttaaattttcggcacttttatttcaggaaagaaagacggaaacattgtatagatagatgataaatgcctggtcaagaaactttaatttgataggagtagatagatgaggccagttttgatttcaggggaattgagaaaagaagggataactgttcttgaagagttgctgagtggtctcctgaaagggagttagaggcagcccacctatacgtatagtagacatgttatgggagttatatttcacagaaactactatgtcagtgatagcattgattactttctggtttatcagctgcacctaatagagtttcttctaatgtagtcagtaacctgaaactagaacagatttgtttttttaatctaccagggacctattctcagtttaagattaaggcagaggctagatatttgcctgtcatggttgaaagagagactcctttgtattgttgagagaccattgatctagaccttaaagtgactgtggattttaccaggcaactggttcctctaatttttatttcttatgtatgaagaaattgatggaccaaccaatgtggtcacaaatcaggtgacagaagacacagcatctgtttcctgggatccagtgagggctgacatagacaagtatgtggtgcgctatatcgcccccgatggggagaccaaggagaaggcagtaccaaaggaccagagcagcaccgttctcacaggcctgaagccaggagaggcctacaaagtctttgtgtgggctgagaggggcaaccaaggcagcaagaaagcagacaccaaggccctcacaggtaacgggagaatgggagttaagtaggtttcctcagggtaaggaggaagttgcttttgaaggtgaagatcattaccatttggcatcagctcttttattggtggggttggagaatatttacaaaagcaattttaaaagagcgttattttaaaaaatttttaatacaatatattttgattttatttgatgatattgttttcccttcccatctactctcagataccaccttgcctcgctgctcacccaacttcatgtttttctcttgctccaaaaagcccccaaataaaacaaaacaaaacctcaaaaatcaaaacaaactaaaaatataaacaaagcgctttctctctctctctgtctctctgtctctctgtctctctgtctctctctctctgtctctctgtctctctgtctctctctctctgtctctctctctctctctctctctctctctctctctctctcacacacacacacacacacactcacactcacacacacacacacagagtttgtttgtattggtttctattcctgtgcatgggggctgcttggcatatatatgcttgttctaccctgtgaccctccatggggaaatagatttcctatttcccagcaggtgtgaattgaagttagctcttcccttaggggtgggactttgcatctattttccacgatcagtgctgagatttttttatcctaaagcaaatttcaaatgtcacatttatgattttttcttttctcttttcttttcttttcttttcttttcttttctttcctttcctttcctttcctttcctttcctttcctttcctttccttcccttcccttcccgttccttccctttcttttcttttcttccttcctttcttttattttcttccttcctttcttttttttcttttttctttttttttacattttaacttcacatggagctataagactatttaataggaatagtcatatttatttgggatgaaattccatatacatctgtcttggagtagagtaaaatgttgtaatttttactttttaatgacaactgaagactttggaccaactataaatttgaatgtttatctcagattacagtggtgatagaagtagtttgcatgcagccaggagctctctttcagacaaatggtttgcattggcatcaacatttgccaaatgcacggatacttcccgtgaacctttagaaacataagatctccaactgcatctgcttggtctgctcagctcaggccttcagatgttctgagacgtactgagacagagcatggccagtctttgtgctcacacactctgttggtcatctctgaattcacaacagtctaattggtatcctcctgctcttccaaagcacttagtaggaactcagagggaaaggatccgctgattgtgtttgtacagtcactgaatacagagaacttcagagaggcatgcataggaattaggaatatggtttcagatccttgaccatttaaaatttaactccagggttgccatttattagctgagtggtggtgggtcaattactggtttataaaatggctcaggaatgtctgtgatacaggaatatggggagggttacataagtgtcttagttagggttactattgctgtgatgaaacaccatgatcaaaatcaagttggagaggaaaaggtttattcaatttacacttccacatcacagctcatcatcaaaggaagtcagaacaggaactcaagcagggcaggaacgtggaggcaggagctgacagagtggccatagagaagtgctgcttcctggcttgttcctcacggtttgctcagcctgcttgttttttaatagaatccagaatcaccagcccagggtggcaccacccacaatgagctgggccctttcccatcaatagctaattaagaaatgccctacagccttgcctacagctcagtcttttgtaggcattcccttaattgatgctccctcctctcagatgactttagcttatgccaagttgacaggaaactgtctaggtcagtgagtgaattcacttaaagcaatgggtgcacatcacttttgttgctgtgataaaacactgaccaaaaccaatgtgaggaggaaagcatctgagaagggacccctgaagagagcctggaaggacaggtgggagctaacggggaagtcacctgtgcaaaggcctcagggatgaggttgagcagttggtaatctcaagtgtcctttatggtaggcaggtctgtgacgtggtaaaatagcaaggatggggcctggacattaaagtgtcccaggagttagaccctttattgttccacgatgacaacagtgatatagccccatctctgtgcttcttaaggtcagttgtctcatgggaccacttgtcactgctaggtctggcccgtggtggtgtgcagggtgaaatgctcttttatttatttatttatctatttatttatttattattttaaaaatattttattaggtattttcctcatttacatttctaatgctatcccagaagtcccccataccctccccctttttttcccctacccacccactcccactttttggccctgtcgttcccctgtactgagggatataaagtttgcaagtccaatgggcctctctttccattgatggccgactaggccatcttttgatacatatgcagctagagtcaagagttccggggttctggttagttcataatgttgttccacctatagggttgcagatccctttagctccttgggtactttctctagctcctccattgggggccctgtgatccatccaatagctgcctgtgagcatccacttctgtgtttgctaggccccggcatagtctcacaagagacagctatatctaggtcctttcagcaaaaatcttgttagtgtatgtaatggtgtcagcatttggaagctgattatgggatggatccccagatatggcagtctctagatggtccatcctttcatcacagctccaaactttgtctctataactccttccatgggtgttttcgtcccaattctaagaaggggcaaagtgtccacactttggtcttcattcttcttgagtttcatgtgtttcacaaattgtatcttatatcttgggtatcctaagtttttgggctaatatccacttatcagtgagaacatatcatttgagttcttttgtgattggattacttcactcaggatgatgccctccactataacaacaggaagtgctctttctttctgggaatatgcttcaggaactggctcctagagcggggttatgaaggcatcatgtttaggaatgcctttttgtttgtaccatattgtttggagttttgactctaatccttacattttgagggagaagggatatcccatcccttatatgccattcttaatagcaagccttataagcacgtaccacgcagacgttcatctatgaggaaggatggctctttccttctttgtagaggggcagagacagaaacttaagttatgcagtttgttctaagtgaggaaccaagaaaaccagagcctagtttctatcccatttcatcacacagatactcgggcagattctcctaggctccttctcatgaacccacacctcagtaccaccagtttacagctcaccccattccctggacacacacataacgttctctgtagaaagcactgacagctcctacttcaagaacatttttcatcccaagagcagggaatagcagagaagattattgaaatatacttatttcaggtgcaaggggtcagagaactgcaagagggtgctatgtaatttatgataaattacatacaaatggcaaaagaaaagtttatggaattgatctatttattggcactgtctgaattcttcctttcagtcatactagcagtttattcttagaatacctgacttgtctacttagagcttagctctctcaatcctcagcatatagctgactgtggagttatttgacatcactattttggctgtgcctttggccttttaggaactagagagtaataaagcttaccctcctcctttgtatctcccttaaagaaattgacagtccagaaaacctggtgactgaccgggtgacagagaacagcctctctgtctcgtgggacccagtggaggctgacatcgacaggtatgtggtaagctacacttccgtggatggagagacgaagcaggttccagtgaagaaggaccagaggagcaccgtcctcaccggcctgagtcccggtgtggagtacaaagtttacgtgtgggcagagaaaggcgatcgggagagcaagaaggccaacaccaaggctcccacaggtaagcagagagagatgcaccattggaatgaagtgtgaacatacagatttgagtgtgcatggtaccacaggttgggacctgagaccagagactacaaggatgcatgagaggtagctcagccagtggcatgcttgcggcacaatctaagtccaatccttagcacaagctggatgtgggggtgcacacttgtgactctagctctggggaggtgcacaggtgggatccctggggctcactggccagccagcctaacctagtcagctagcctcaggactcggtgagaggagtaagattgcacaggagtgacgcttttagcagactcggtggttgtgcgtagagggtctggttttggaaatacttgtgacaataccttcagagtgctcaccggagaggcagcccttgataaaatgataaattagttaccctgacagtgtgacaggtgtttaattggctgtcttgatatgccatatgttactatgaagagaatattccttctacattttagggagccaaaagtcaagaaaacatgttaagtgtatagctagcctgatattgagatagagacccagaaactgcttcctcgcttgactcacagcagaggcttggcttggtaaaccattgccttgtgctgaatgttctggaagataaaaagcaagataagggggtgtgtggcttccattgttatagcttagacttctcaaacatgttcctttcagacatcgacagccccaaaaacttggtaactgaccaggtgacagagaacactctcagtgtctcctgggaccctgttcaggccaacattgacaggtatatggtgagctacacctctgccgatggagagacaagagaggtcccagtgcctaaggagaagagcagtaccgtcctgactggcctgaggccaggtgtggagtacaaggtccatgtgtgggcccagaaggggacccaggagagcagaaaggccaacaccaaggcccccacaggtaatgggacacgcattgcgctgtgcatgagatggcgaggttggcttctccctctctgacatgattttgttgattagaggcaatgatgctccctccggaattgtatacctccttctcttacaatgcatgtcttacactgtaagtctctaaaccgtggtctttacagactgatgcttcctgcttacagcctcccctgcttgcctcttcttctgcctgtgaagatgatttgccattagacctaagtgtttcactctggcaggaagcaaatatgaagggagtgcaagcaactgtcaggcggagagagccagccttgtaaggttgtgatccaccaacaacttctttttaaaaaatccgcgcttgtttagacccttcccatgaagtttgttcctgtttctgcccttcggatgagtgctgtaggcagaaataattgcagtgttttgttctctacaaacaagccagcgactagtcccccctgtgttgacttttttagtaatgaaaatgtccatttccatgtatgggtccatccttcatttgcagttagccatttgcatgctaactgcttgctgtgggaagcggtactgctcagcttttcttctgttttcctccttgaactttaggtcccttcctttccgctggctaactctcattgttttccatcctgacccgttaccactccttcctcctaatctcctagcgctcttcatttagtggttggttgattcaaggttggttagctgaggacccccaaactgccctgatggtgtcacctcacccttctagctagtcctccaggacagctcctgacacgatccccaagcactttctcaactgatgttcagttcatgggaactgcatcccccttgctctttgtgagagcatcctgccattttctcactgatgaagaattttagccacatgtcaaacacctgctgatgtgttccccgtgctttagaaagggtgtctcaacctcggcgctgctgacatttgagcaggacaatcctttgttgcggggctctttcttttgtgttggagaatgcatagcacaccctgtatctccctttcctctgccaagttgtagctgtcagaatgtcttaggcattgctaatcaacctggctgaaatcttttgctctatagcaaacacagtaagccctaccagggatcgaggtgaaacagattaaagttcagacctcacccaaggtacacaaagtctttttatgtaattccagtttctgagtcctaacatactggcctctccaacttccttaataactggacatgtttataaccatgttagccaaggaccttaaaactattgatccctccttacctgtgggcttccaggtgggaagttagataccatttttcttgaggtcatagcctaaagcaacatatgaaatagaacctttgaacaaatcaccttaggaaaatggcttttttaatgaacttctttaaaaaaaagaaaatattactagtttattgataaaatatattttcaattactttatgttatgtagtatggaggacaaaaatcccttggatttataaagtgtcaatgaattgatctcatcatagtaatgatagttgaaggtttgcacatctacctggtgctaagaacagtcctagcatgtgattaactcataggatctaacactatgatgtaacacctttacaagatataaatcaatatcttccatattccatttttgtttcctcttcagaagaaattgaggcacaagggctgggatgccttttaccaagttttgaatctcagaatgaatcttctgtggtcctgaagctgtaaacattgtttttatcttacttggcaaagctaaccacacacacacacacacacacacacacacacacacacacacacacacacacacatacacacacacacacacacacacacacacacacacacacacacacacacataaacattttctactttacaaatgcagaacagagtaaagcaacttgcccaagtattaaaactaagttaataattgatgaaaatagatggacatgttgaatattggtacctcaaagtctataaaagagtctctctctaatcttagagatgaggaagcagagcttagagacaggcagctgaattgccagaagctggctatcaactggatgatggcagagctgagacgaagttcttggtctgctgactggaacccaagggatttcctgccctcagcaatgcttctgaaggtagaacatatagaacataaagatcctttggactttacagtttcttggatgcagtgttcattccagtgtcctgtgctgtccccctgaggctctgaggtcagctgtggagacaaggtctctgtccatgaagcactgaagatacatatccaatatggagaaaccttaagaactggaaactctcccagcccaggcccaatggtctcagtttctggagcctgttactagtgtctactgatcatctctttctcttttagatattgatggccccaaaaacctggtgactgaccaggtgaccgagaccactcttagtgtctcctgggacccagtggaggctgacattgataggtacatggttcgctacacgtctcctgatggagagaccaaggaggtgcctgtgtcaaaggataagagcagcacagtcctgaggggcctgaggccaggtgtggagtacaaggtggatgtatgggcccagaagggggcccaggacagccggaaggccaacaccaaggcccccacaggtatgaacattgtagccggaggatgtgacatatttcatggtaagctttaggaaggatacttgctattccttctttgatcctggaagaaataaatgatcatagaagaccagagtggtacacttttgtcataatacccacaccctccccacatgacatttacatttaatctagaaatatggactcatgctttggtctttcaaaggttagtgattgttcacatcaacatattgttcttcgaattgtatatttccatcactgtcaaacactgaagtatttcatcttgaagataaagtgacatcaagatgcctatgctttagggtctaggagctaagtgctttggggaaatggtgcctgctgggctttcctcgatacaggagaatttattgttctgttcgtgagtagattctcttgagtactgtgtgtgcgttccactttcacggtcctagagttgcagtacgtacctagcatacacaacaacagttggtaagttcaaggctttcctgcttctgtttcatttgcaaagaatagtgttataaagatatgtgtgtatatatataatgcagtccttaaagtatacagcttagaagttagtgttacatattgacagtgctgtctaacaattagcactctttagaacattgtcctcacaataaagaacatgacatacatttccagtcattgccctttctcttcccctccccatcagtagcaacagctgtctttcctagatttctctgttctgcacagttgtaatacatggagtcacacagcatgtgctgctttctcagaacagagttttccagttcatctgtgttataacatatatggacatttacatttttttaacattaatatttccttggatatacacatttgtttactattttgtctcggtggctatttgttttgtttccacattttaaccatcatgaataataacactggggcattcatttctcttaggtagatgtattagaaatggattgttaaccctatgtgtttaattttgagttcttaccacagtaatctccaaagaggctgtgccctttcacacacccacaagcaaagatcagggcaaatgtcttcatgtgcgtggtcctgaggagaatttgttattggcagagcaggagttcatgttctcattcctagctaagagtcctcaacctagtggagtatatgatttctataattcacataaaataaagatcatagtgtctgactcatgaaatactcatgaaatattgtggcatattactgtatatgtttctaaaatccactcttacaggtgaggagactgaggtttagttagaagttgaagtctccaaggctgctgggctgggaatattttcactatcttgggctacttccttgaggatctgagagtctagttgtggagataagatctctgtccatgaatcaacatcagtataggaaatgggagaaacagtaagaacaagaataaatgctcagtccagccttaaagatgtctactgtgtgtgcatgtgtatgtatatgtatgttagaccagtggttctcaactttcctatgcggcaaccctttaatatagttcctcatgtggtgatccccacaaccataaaattatttttggtgctatttttaacttaattttgctactgttatgaatcataatgtaaatatctgtgtttcccggtgttcttagacaactcctgtgaaaggttgttcaatccccaaatggattgtgatccataggttaagaatctcctgtttaggcagagtcttgttgggcagcctatactgatctcaaattcatgatctcatgatcccaggcctcagccttctgagtactgcgactacagacgtgacacaccacactcagtttactagtggatactgatcaagcttttcttttagatattgacagccctaaaaacctggtgactgagcaggtgacagagagcactgccaccgtgtcctgggacccagtagaggctgacatcgacaggtatgtggtgcgctacacttctgtcgatggcgagaccagggaatttctcgttgggaaggaccaaacaagcaccgtcctgacaggcatgagaccaggtgtggagtatcaggtcgacgtgtgggcccagaaggggacacaggaaagcaggaagaccagcaccaaagccccaacaggtaatggacattgtcccctgagaaggtagcagttatcatcccacacctatgagaagtcatgtttgggtttctttcgctgctatgatgatcagtgatttcgagagaatcgggatggcagatcatttctgtacagcttgcaccatctctaagtgctggacacatgtctcttaataaggacctcatgttcagccttccacttcagcctcatagaagttggtgataagctgtggatataactcagtagtgaatgcttgcataacatgaacaagtccctgggtttgatctgctggaaaataaaagggccaccagtggcaggtgacttctgcccagtgttctttcaaccatgtttcccctttgtgttcagtctcaaaatatttctcttcatgaagagatggaaaggagatggatgttagggcctgtgaagtaagtactttaggaaaacggctttcactgcgatcactttggagcaaggagaggatgttaatttttagtgataaatcctctcccgagtgctgtgtttcattctggggatcacaccattgctatttcatataacatttggtaatcatcaggcctctcatctgtgcttacacattttgtcagaacaatcgtattagctgatatttacatattgaaatgcaccttttaatatgtatgacttgattaatttagactactcacagagttctgtaactactactacagtctattctcaccactgtaaagaactaagctcagactcacggccattgccaatcagtctccaacctcactacttccaatgctactaacaatggctgcctgtctctatagttctatgttctggacattgtttataatggatttatcatctatatagcctctggtgagatctcattcattttggtttctttgtattgtaacacatatcagtatgtaaattagtatttcacagtacatgtgagcacatttgattttcagtttgctccttgtttgatatttggattattttaacttttaaaagtctaagatgaatatgttataaggacatttgtatgtatatatatatatatatatatatatatatatatatatatatatatatattttgtgtgtgagatgctagggttcaaacctaggatctggtccatgctaggccaaataaattattttgtcagactaagatttcatgttgtcagtagacatctgactatattcccatccttctgtgcacaagattttttttgcatatatatgccatcacttttcttggttatataactaagagtagaattataggatcatttggaaattctaattttaatttattaggcaaaagttgagctaagattctaaatgctgcctagcaacaaataaggactattttgtctgtgcacttagtcctcagagatgttggctacattggtagatcaggcctgagttagtgtcttcatttcaagtctgagaatccctcagttccatgaagtgagtgatttctgtaagtcacatagctgatacctcgtgggtttcatttctcaagtactcatgcagtactgaggtatcttataatttattaacccaggcccacaagtacaaataagaaaagtagtcaggctattacccagttacccaggctgatggcagagctggggtaaagttcttggtctgctgactggaacccaagggcctttctgccccttagctctgcctcttaaggtagaacacagtcttcttggatgcagtgttcattccagtgtcctgtgctgtccccctgaggctctgaggtcagctgtggagacaaggtccatgaagcactgaagatgcatatccaatatggagaaaccttaagaactggaaactctcccagcccaggcccaatggtctcagtttctggagactgttactagtgtctattgatcatctctttctcttttagatattgatggccccaaaaacctggtgactgaccaggtgaccgagaccactcttagtgtctcctgggacccagtggaggctgacattgataggtacatggttcgctacacgtctcctgatggagagaccaaggaggtgcctgtgtcaaaggataagagcagcacagtcctgaggggcctgaggccaggtgtggagtacaaggtggatgtatgggcccagaagggggcccaggacagccggaaggccaacaccaaggcccccacaggtatgagcatagtagcctgagcatgtgacgtatttcatggtaaaccttaggaaggatacttgctattctttctctgctcctggaagagaccaatgatcatagaagaccagagtaatacacttttgtcataacacccacaccatccctccatgctatttaacacgttggttcaaagtaaggaccccatattctcctcttcttttgtctcttgaaggttaatggtgattgacacatccacccacggtttatcaagatgtgtatttcctttgtggtcagtttcaaaaggatcctcttgaaaagaaagaacatatgctaggatctgtgagccatatactttattgaaataaatgacttttgctgtgctctctttggaacagagaaggacattgctttcttagaaaagaagccctcttgagtactatgttttcttctctgaagatcctgtgactaattatatctaagaacagctgataattctaaagcttttccatctgtgtttcctcttcatcaagaatagcctccccaagatggcttttcacactccaattcaccctcttgaagagtccagttcagggcatatagtattttcttgacatagtctcagaattgcacaatgactgccactgtttcagtgacatcaccagcaagagggacctcctcctgtccatcaccagcagcttcccagccccattcctgcagccataagtaacaagtgctgtctgtctctgtggaggtctctgcttaaataaaaaagtgtatttttgttaattcttgagaatttcataatgcacacaatgcattgtgatcattccccactctccccatctcctcccaagataggttgttgtcccttctttcttctttataacccactaagtccactttatactacccatatactcaggggtgtggggccatccgtggttgacctaccacatccccaaaggccctttttcagaacctatcgattgtcaatagcctctcagctggggggccgggtcccattcatgctgcacggagttcaagattacagtggtctggtcatgtccacagacatgtttttgtgcaggtcctctccaactctgactcttacagtcttactgtctcttcttcgtcaatggtccccaagctagagtgtgtgggatatagatgtcacatttgtgggtgagccctccacagacatttgttctctgaactgtgaccagttgtcagtttctgcatcagcttctgcccactccacaaagaaacctctctgacttgttatagatatatgtcacatttgatgtggcctttagtgattgacttttttcatgaaacattattcctcaggatctgtctcattgtagcatgaatccattctaaattttatccttagtgagtgtttcattgtatggccgtatgacaatttgtttctccacttgtcacttgtgaaattgtgcattgtgtcatagcatttgtccttgagtatgtttccaggacataaatgcctaggagtaaaatttctggatcactctcttattctgtcctttatttttcactatattatatatgccagtatatttccatagtgtttaccccactttacacacccattaggaggaaataagggctttcttcctttcctcagaggaatttgctgagttgatagcacccctgttttacaataaaaaaatctccaaaccagtgaaatctttgacttcaccaagacatatagagagctggtgaaggtagaatctgattcatgaagtatacacggaatattggcctatcttataacctagtctaagggtcacatttatgcaaaaggaaactggctgtggtggccatcccattgtcctattctttctctctgtggaaccaagagtctctgtctatgagatcacataatgaaagcagacatatggggtagaaaactctaagatcaggaaactcagcccaagcacaatgacttcagtctttgtgtctactttagttagtgtttattgaccagtgcttatcctttcagatattgatagtcccaaaaacctggcgatcgaccaggtgacagagaccactctcagtgtctcctgggacccggtacaggctgacattgacaggtatgtggtgcgctacacctctgctgatggggaatccaaagaattcctgattgggaaggaacagaggagcacagtcctgacaggcctgaggccaggtgtggagtacaaggttgaagtgtgggcccagaaaggagcccgggagagcaagaaagccaacaccgaaggtcacacaggtaatgaacagcatgggttagcagtatgatggctgccaggccaagcttaggggaagtcaagctttaatttcttcctgtgatacagatgggtattgatggattttggaagagcagctttatttcttgcacgatcaacttcacataccattccttactccctgaaactggtttccttatgtgctagaccagtgcttttccaccttcctagtgctgtgaccctttaataaagttcctcatgttgcaggggtctccaaccataaaattatttttgttgatacttcatagatataattttgctactgttatgaattataatataaatatttgttattttccaatggtcctaggtgacccttatgaaagaattaaacctgcaggttgagaaccactgggctatgttctccaaacagtctccaaactgctcagctgaatagttcctgatttctcttccaagtgcttggatttcttgccagagatattattttcatgagtaagaccggaaaatgaaaaaaaaatcaaaatttactttaagattctagattttacatctgctgtcacaagtaaaggcttgcttctctacatccaaatcatattttaattataaaacaaatttgtcacggtaaatgataagccccgtgagagagctctattgtcatgctaatggacacaaacttgtttgcaaaagccaaggtctccaacttgaatctctgtatgttgcctgtcgcatgccttgcatatagagcaaaagcttgatagctttactaaatgaatgagaaattagtgttttttttgaacttttaatagaaatcatactttcggttgtctgattctggttgtttggggtctccatgtgggtagggaagcattcctgggaagagatgtgaatgtatgaagacaagtaagaaacaaacagcaaatgaacaaacccccaccaaaatagagtgtctgagatagaaaacaacagaaaatgaaaactcaccactcaccatagccagcagtgtctgcactctgagcctcttaatggtatatatcgatttcttgttgttgctgccatcattatcaccaacatcatcaccaccatcatcaccatcatcatttttgtgcatgtgtgtgcaagtgtgtgtgtgtgtttacacataggcacacataggacatggtacatgtgtggagatcagaggataattttctagagttagttctctcgtacagtgtcagggatgacagtcaggttgccacatttgtgcaagcatctctactgactgagccatcttgctgacccaatagcacatactgactaagacttttaaacttgtagacattgacagccccaaaaacctggtgaccaatcaggtgaccgaaaatacagccaccatctcctgggacccggtgcaggctgatattgacagatacatggtgcgctacacatctgctgatggagagaccagggagattccagtgaggaaggagaagagcagcactgtcctcacaggcctgagaccgggtgtggagtacacggtccaagtgtgggctcagaagggggcccgggagagcaagaaggccaaaaccaaggcccccacaggtaatggatgctgttcattgggactgtcaagcttgtcatggaagagcaaacattctttccttttcttacactgatgtaaaataggaggtgaggaatgaacatgctgggttaataatagaggttcatctattactgctgtgtgatggcattggtgatttggggtctgtgacctcaaagactggactgttttaggaggacaccttaacccattttctccgacatatatagcacctgtcagagacaaggtaaatttgtaaacaacaaacgtttattttattttattttattttattttattttattttagatttatagttgtagaaaagaatcccagtgtctgggttgtcttgcatcatcacacacatggacaaataaacatgtaagacaaagagaaggcagaacttaagcctagatctgagctgatgtgcacagtcctgtgggggtatcagtcctttagtgagggctctgctctcaaaagttctacttcttaaaaccttactgagggttttgatgtaaaataggaaggaaggaaggaagggagagggagagagagagagagagagagagagagagagagagagagagagagagagagagagagagagagagaaagagagaaaggaaggaacccaaacctttcattcactttcaaagagagcaaagtagagcaacagatcctctgctgagtagtcgccctaatgccttgaaacttttcccgtagcacatgcccttaattgttaatgttccccagctactgaagatttcaggaactaatgcgaaattaatataaaagttctgggttaaagaactgtgttgaggcaagctgttcaacgtagacttcacctaatagaaagcatgtggtataaagttataaatgtcaccctgggaagcaggagagccctgtgtctagtatgaagctaacttttcatcgccatcttttaagggcatgacggacctagggatggagtgacgaacaacttagtatgatctgtgctctcctgacagccagtgggagagacaggcaatagatgaaaaggaaaatatgtaactgtaaattatggcacgccctccaaaggacatgaagatggtggaggttgagagaagagtgggatggaagatgtagtgatttgataggttgagatggtcatagggtgcgcattgtcagatgcaccaaagagctgactattaacaatgcagtttatacagaaaaatagagtgtaagtgctcagggctgacatggtagctccctctgtgcaggagacccaggctccttatctgttgtatatctgtcacccttaaggaattgtattcatttacttggtaaacatacatttgcattccagctcatgaaaagagtccttggaaagggcagggaatattccatgcatcagttctcagaaatctttctaagatccaagatacagtgcctagcctcagtgataggcagctaaagaaagaggtcctcagacagatggccacatgctcagcttcaactctgctatgctgtcctgttcagttgtcctccaaaacaaaaacaaaacaaaacaaaacaaaacaacctccaaaaccaactactttaattagacaaatataagtaaataaattatttggtcagactaaccacatttcatgttgtcagtagacatctgactaatggctcagtgatgtgttggacaatctggaggagaagctggccatttctggtataagtaatttcaggactgtaatctgtaatgagatgattgagaaatgggaagaggtaggtatcattggagcaagaggtgagagagcaattgtcctgagatgaggtgggaaggaagaagtcatcaggttacacagaagcacatggtgcctgaaggagaaactgtgccttagctatagattagaaacacagcatagtatttatctaaaactatttttcaggacacagtgagaataagttgaagagatgacaagggaataaatagatcagtaaaggagttactattaaaatctggttagtgacagtggaggggtgacaacaatagggatacagagaaggagatggctgacaacatattttggagctacaagcaatagtacttgattgataagacatggaataaggaaaataaagaatcaagtatgactgtctgcttcgagcaatatggaagattgcagtactatttctttttctgagaaaggaggctgaggggggtgtttatctcttcagggaggcaatgaagacttaaatgtttaaatttgaaatgcctgtgagattcttttgcttaatatatggtttgcttttattagtcccacaaatacatactggggatgagccaggcattgtagaagatctgcagtagtatgtacaaaccaggggcttagaattgtcctcttgttccacaagggtagccagtaaatatttcagagcacagatatgatagtatcatatttgtgacaaatggggaggtagggaagaagagagagagggagggaaggaagaagggagaaagggtgaaagagaacgagaaggagggagagagaaaaagaggaggaggaagaaaagagagaagagggaaaagagagacagtgagaagcagaggaagaggaagagggagggagggagaaagggagggagggagagagagagagagagagagagagagagagagagagagagagagagagagagagagagagagagagagaatatgagagaaattacaatccagtgtttagatgttccagcatatgcaggttacaatcaaagggctgaagaggtgaggcagaggtgccaatgtattaagcacattggaagagtatgaaactatggaagccaagagttgagagttttctgagaatgaatggatctgttttgtacaatgtcactcaaagattgagtaaattaaaacaaacaaacaataaaacacaaagactgagtgaactgaggatgtccatgtccagtagagagttgtccatctagaacgttttagagatctatactcgcagatttggtggtatggtgcagggccacagtggagctgagcttgaatgtgaggtgagtgatgttgaaatactcagatccttctctggtttatagagaaatgacatgaaatgtgaaaagaaggggggtccttgatactgattttctgagactgatagtggaggggaaatactaatgatcaagagatagagagaggaaaagaagaaagccctggaggtggaggaagacttaaacattcagagcatagaggtctttgtttgaaaacaagaaatagggatgagggtcttcattgctcttcttttataagccaaggggctggaggatatttggtgaagcacagtaggtacaatggagagcatacaggagattgttccaatgacagtttcagtggcttagctagttctgattttcactgtgatgctgatgaaaatgggaaggacagaacatttccagaggaataaatgtagagaagacatggttttctgttggttgtaacatccggtgtctatttccctggaaaatggactctgggggattctcattcccatacccttccttccttccttccttccttccttccttccttccttccttccttccttcnnnnnnnnnnnnnnnnnnnnnnnnntctttctttctttcctttctttctttctttctttctttctttctttctttctttctttctttctttctctctttctctgaaatagtaccttaccatgtagccctgactgtccttactgtctgtgctcctctggcttcagaactgttaggattgcaggaatgggccactatatcttcttgtttctgtatttaccactgttaccgataagattgtaccagtcataattagactattattagctctcttgaatggaggaaaactcttgtggaagggggtggtgagatgcttttccatggttctaaactcagccttttctaaatcttaaaaaaagaaattgacagccccaagaacttggtgaccaaccgagtgacagaaaatacagccaccatctcctgggacccagtgcgagccaacattgacaggtacatggttcgctacacctctgcggatggagagactaaggagattccagtgtcaaaggatcagagtagcaccatcctgacaggcctgaaaccaggcatggaatataccattcatgtgtgggcccagaagggggcccgggagagcaagaaggctgataccaaggccctaacaggtactatgacacttcactctttccaagagtgagtcttcctctataaaaagggtgaggaggggaggaggagggatggttgctttatctgaagatgttttccaaagtggttctccattaaccttgcttgtgtgtgttgtatgtgtttacatgttcatgtgcatgtatgcatatgttcatgggcatagaggtcagaggttgacatgaggtgtctttctcagttgctatccatattatttttttttgagatggtctctctttgatttggctaggctgtttggtcagtaaagctcaatggatcttgtctgtctctgcctcctctgccctggtattacagatatatgttactgcccatggctttttatgtagggagtaaggatctgaacttagattctcacgcatgcatgtgaagcacttgacccactgagacttctcttcaggctcatagttctctttctgaggtagtgctttgacaggttaggtaggactgagggcacatagtatatggttgtataagttattcttccccagcctattggctgaggccagatgccaggatctctgtacctgatttgtgttagaaactggttgggtctcagctcctgctgggagaagaaagaaacaggaactgactgggcctccatgggacccaaagtctgtggtcccttcaggcattttgaacaaggtctatttatcttctctatgaccagtagaggtgccctaaatttcttgatggtttttattagttaaaattaagctctccacacacattaaaatctactaagaataaaaaaaatcacattggaaatatttgtaaaagaaaaattaaaaaccaaaccccaaacgcctttttccctagttccagactccctagaatctggctccctagaggcaatggatggccattgtcctccccttcatctcccccactactcttcctcttccatactcatctcctctctcccatttatcttctcattcctttactttccccagtttaaaacctttaaattatatttctctctccttcctttctccccctccctccccttcacttccccccttcactctccctctgtgtatgaatgtttgcatatgagcatgccacagcacacatgtggaggtcagagaacagcgttcaggagttggttctctccttccttcacgcaggttctgggattgaactcaggttgttaggctcagtggcaatcactcacgggcaagatgttgctagccccactttttccaaaatttaaagacagcaacgaagctatcaccttcctgctccatagaaacaggaaattaaccaagtcagacatcccaagtccacagccaggggacagtggttaatcaaagaggaggcagaaactgcctcaaaatatgttaataactatgtgctgatttgattctgaaggaaattcagtctctctatgtgatggatagcgaatgatccatgccagatgttaggctttacaaaatcaaaccaagctgatattacagagactcaaaatttgtcaaaacaacctaattcaaaacaacagctgtctgatttctattaaaatactacaattcagttctcagctgaaatgctactgggtagaaaatagcctggagatgtagttttgggaagttctaaattagaattgccttttatgattttttttccttcaaaatggaaatttccattcatatcttatttgcttaaaaatatgaacattctgaccagctttggtgggaattagtatttttgctgagctttcgttttctatggtacatgctcacatactcatgcacaccctttggtgtgtgctcacacccccatgcaagccctctggtgtgtgcttacatacccatgcacaccctctggtgtgtgctcacatacccatgcatactctctggtgtgtgctcacacacccatgcacacttccagtgtgtgctcatacacccatgcacaccctctggtgtgtgctcacacacccatgcacacttccagtgtatgctcacacacccatgcacaccctctggtgtgtgctcacacacccatgcacacttccagtgtatgctcacacacccatgcacaccctctggtgtgtgctcacacccccatgcatgccctctggtgtgtgctcatactcccatgcacacttccagtgtgtgctcacacccacatgcacatttccagtgtgtgctcacactcccatacacaccctctggtacatgctcacacacccatccatgccctctggtgtatactcacacacttgtgcacactctctggcacattctcatttttgtgcatgcccttgaatctttgctcacacatctgtgcatgccctctggctttgtctgtacccatcttagccaccattccttccccctctgtttctgagaaagagtctcacaggaaggtctctggcatcaagctctctgaaatcctcctggctctgcctcttgaatgctgatctggcaggtatgaatgaccacatccactttctttttaaatatctaaatatttaacatatatatttctgtactgggtatatattgaaggcttagatgcttaagaaataaacctttgtattttataccaacttaaatttatcccaagtccccttacacattatggtccctaatctcagtatctaagtctttggggctctctcagtactaggcataagaagatgccagtttttcattgcctctccagacaggtaggtgcctttgagtgacccctgtgttctctgtgcagggccctttgtaatctgtggctctcacctttccaagtcactcaggaagctccaccaccatagagaacctgtgtgccaaattagacttctcagatctgctgctcttggaatctactggggaaacgaggcccagagttccttcctctagagactacacaatgccgtattcctagaccctcttgaactctacaggtccatacttctagaggcaaaggctagggagactctgagcaagaacagacttgccagcagctggagggctggatgagaaatgggacaactcgcaggaggaaaagaaaaacagatgactgaaacttgtgcatggcttaggaacaataattacgtggcttctcatttacagaaattgaccctcccagaaatctccgtccgttcggggtaacacattctggtggggttttgacctggttgcccccatctgctcaaattgatggctacattttgacctaccagttcccaaatggcaccgtgaaggtatgaggacttcttgtacttctcttggtgccttctcttcccagcctccccgtagaacaacttgttggcttgacctgctgatctgtcacctgctaagggcagttatttgtgaacgccatgctctcggtgtaaggactaacctctgtgtctgctcctagatgactactacatatttgctggctgtgtgtattctccattttatcattctttttttttcaactgcttatttttaatttctagcggctcaaactcaaggtcttgtgcatactaggcaagctctgtagcgccaagctccacccgtcagctctgctgtttcctacttcctcctgctcttcctgcacttcctcctgctcttcctccagcaccagctcctcctgtatctcctgcttctcctgcacctcttcctgctgcacttccttctgtgcagctcctcctcttgctcctccccttctctatcttctcctccccacttcccctcgccctccctctccttcttctcctcctcctctgtaaattgttgggcctgcttaatatatttagattccaggaggactgagactttttttttaatctaaggcatttagattaatgcttcgcatgtgaatattttcttttgttttatttttggcatcagcgaggcttgaactcagggccctgtacatgtcaggcaagtgttctgcccctgaactatgtctgtccctagccctttttagtatttttattctgtgacaaggtctcactaaattactgagctgacttcaagcttgcactcttcttgctacagtctggaaagcagctcaggtcggagtctgtgcagccacacaccaggccaccaataaaaatccactgaataaacagttgaccattattttaagggctagctttccttgggaatctctgaagtccagcaaacctggccagtagaaaatcattgttctctctgtagcaataaacaaacagataaaaaaaataagaaagaaaaaaagagaacactttgacttactcattattacaatgactgcatctgactgtccgacttggagagtttagtccaatgtttacagagtaaggcatattcagggtttcttgaaataccaactacttcagtgtctcacagttatgatggccagtttgccttctttctaaaaccatgttcttaatcaaacattgccagcctactgctgatagcagttactatcgtcagtgcctctccaggtatctgaaggaccaagtccctaggcaacctggctggggttcctgtgttggccatgcacagcctcagttcccagctagcccttctagcagggtggactgtccatggcatggccctccaggaaagtgactgacactggctgggattctgggctgccactgagcacatggagcagttttaacgtcatgtgtgtaaatgctgctgacgcccaggctgctgggcagagaaactgagttgctcactgcctgttatcgcttttgtttataggaggtggagctcccaagaggccagcagagatttgaattgcaagacctggaacagggtgtcacctatcctgtttccttggttgccttcaaaggtaatcagcggagccggactgtgtctaccaccctttctacaggtaacgtggaatctagtcttttaagtgacaatacacagagaggcattggagcggccagggaggagtgtggaattatagagaagtaaaaatggggttctggtttgcaaaccagttcaccccacagtgatgtgactaaagagggaagtggggaagctaggagagtagacctaagacactgagggacatgagcctaacttaaaggtgcatttgcagagtttgatggaagcagagtgatggccagctggccttccttctaaaaacatgtcccatgatcaatatgtgagctaagaattggaaaaagcaagtagtgtaggaggcgatgaaataatctccagaccaagcgaattgtctcgtaatggggaaagctgcaatgtctcttctttcccgtctaacaacaccgtccttctgcttggtctcagtggatgctcgctttccacacccctcagactgcagtcaagttcagcagaacaccaacgctgccagtgggctctacaccatctacctcaatggtgatgccagccggcccatgcaggtgtactgcgacatggacactgacggaggcggctggattgtgagtcttaacggtgctcagagaagctccatggaacatcttgtttcttagcccagggagatggtcgtagctgctccatggaggtcctatttcatctctgcctatggagggaaggaaatttgatggcttgcaactgtgtggagggagatcttgtcccattgcaagggcttaacactcactggtcacagaatgggcttggttaaaccagagtgaaagactatgagtttagcatcatcaaaaaatgcctaaatgtttctaaattctaccctcttcaaagcactttgaaaaccatgaccttcacatgatatgttagtgtgagaggattatcattcttgttttgcaaagggggaagctgaagcttacagagaaaacatctttggttgagtcagtcacacatgtcagtgacattgctgaagccaccattccaggagacacatatgccagatcctcgatcttcctgatggcttgtgtcaggtcacacaagatggaaatacacagcttctttgggggagtcagtcctttgaactagggcctctggtttttggtttacaccttggctctgtaggacagaaacaaaatattagggctttgatttgaagagtaaggccagagctagggaagcttaggctgtgtctaagctgtcccagtctgccaggaagttttactgtcttgggccactgtctccttgcattctgagagttctttcattggttgctgattcggttctatgatgaatctttgaagcttgccggtggattattcgatctttctctcttacttggcttctccctgtgtctgagccaattgagggtcttactttctctaatgaaaggtagctttcacctgctgtacattggaaccaattgtgggagagagaaagcatggcctcatagtgtcgagctatgttcatttacacgttttcttagtgctctgggaagccagctagtttttgagcagccacaggtaaaatgaaatcatctgacgagtggcaatgaagagcacagagcacacagtgtctgcccagtgacaaggaatagtgggatgtctgtttcatccaacaattggttggatggcagaaagtcttgatttataaaataacacaacagattgtaacatgggaggtctcccacctaagcagccctgtatgtctgtgcctgctgcttttcatcatcaccattgtacctgagctcagttccctcaggcccacagcccaatttaccacagttgtgcttgtaattgaccactggcaggatgtctgtactgtttagtgtggtctttttttgaaagcaaagcttgtacaaggaagggaccatttatcctagggcaggagagagaaagagagagagagagagacagagagagacagagagagacagagagagacagagagagacagagagagacagagacagagagagacagagagagacagagacagagacagagagagagagacagagagggagagggagagggagagacagagagaggtagaaagagagagagagagcagagagagaaaaagagacacacagagagaagtagagagatacagagatacagagagagacacacagagagaggtagaaagacagagagagatggggggagagatagagagaaggagaggtggtggtggtggtggtttgtctccctgcacaacccatgatatagtgtacaaatatttattgagtacctactgtgtgtcagacatagattaaccatccaggaatgaacaaatgagacgaatctctgacttgctttctatatacccatacaaatgagccttccttaaacactgtcagttatagaactgctgaatccactcagtactgtaaccagtatcagtctcatcccccatccccccacctcacgttgtttgctccggcctccagtaggtaatatatgtagactgtacagaggtctcctctaagtcaggagctccacaagataaatagagttctaaaaacttctactatatatttcacttactgtttggggtttttatttggttcaagagtcttctaactcttaaagataacccaggcttctatcaagcttttaaaatccttttatgaaagttgttctctggtccaggctgcaggcacctaatttgatgaacaggcagaaggactttgcccccaaggctacccagacagccaggaggaggctggaaagaacatcagggaacacttaaaagtttcaaatctttccatcttggaagtgtaagggctgcaccaggggctctttccacagacagttcaatgcaagtttgatcttcccctcctgatttagtgagaaatttctccaggatgatgacagtgctggattacagaccccaacatagatttatttccttttactatttttttgagtagttcattgtagagcatttaaattttcaaaattgattaaaagcctcaatcaaagccatctgatcaagatgtataaattatctgtgtgggtcagtatacttaaatatgacataatacaatggaaatcaacaattattaagatataataacagtttattgttatctgtttgtgccagactctgctatggtatgacttgctgacctcactgaagacttcctctaagctctgaggtcatggggcctagttatactttgacctgacagttcagagaagcttgggctgtgggcatagctcagttggtagagtgcttgcctagcatactcagagtactgagattgttctctggtagcactgaaaactggacatgatgctacacaactgtaatgttagcacatgggaggcaggggcacagggattagaagttcaagatggtcttggctatgtatgagttcaaaaccagcctgcacatactgggacattttaaaaatactaagcaaaacaataaaaccccaagccccaagcatgctcactggagatagagaaattggtattgcacatttcattagaaaggcaggctcagaatcaatcccagccttggttgaggatgctacttaacacagtggatagacacataaggaatgtcagcaccatgtccagcctagattgcactgtgagacaagaagaaatccgagagcaggttgacacaggctccttactaggaaacaaatctcccaagtgttcagaaatactactgaggaaatatacctgggagagctagactctcaaactttttgaccaacactggactgtgtatcatccttgtttgagccaccaaatggttgtgtggatatggctaatttttttggactttgccatctgtaaaacggcattgttattttttccctcagaatcaacattcattagatgtccggtaaatggttgctatgttaagcccaaaataaatgaagaatgaaggaaaaaaaaaaaaaaaccaatcaaccaaacaggaaaaaaaaaaaccccacccaatccaagcgggggaagctttaacaagtgggcaacagggagaaaaggagctaagaacagcgtgctaattagctgtgttacttctgtgtgcaatgacttgctgtgattttccctaaattcttcttgtcagtttatgcccatttatgggacatttttggaggacatgtactgttccatctagccttcccagaaacgctgtggcagacttctcttccccactcctctctgctttacagtgagctggctgggatcagaaaccaaaatgactgactcactatcccccaggccagaaagtgtctgtggctgacttggagcctggaacattctcttcccatgggtgtctttattcagcacctcctcagccacagagctgtagtggtgctgaagggagttaatggtgagcggccacgtgtgacctcagctcgtgtcacttttagagaaaaatgtaaagattccacaaccattaggtttccttcaccaaattcaaggctatagataatagaatttcatgttggggcttcttcctttagatcagtacaggggaaacagaggtagacatacaattctagactttggtaagtggttgctaatcatcactgaatgggccacaacgacttttagtttggtctcaagttcaagtggaataatagcattactcttttcaatactgtgtgcaggtgtgtttgggtttaggaaagttttcgagtttatctcatataaaggagtctgatttactcggagggggaagtggccttcttttcccgtgtagagatctttttgtatacaaagcagctcatctttctgaaacagaaccaaatctctagttctcatttttcttactcctcagcccagcccagcctgcttcctgcctctctctaacccagcccttgctgaagtaattggggattttcatgtcactaaatcccagggagttttgatcttacatcccttcacccctcatcagtactggggactactgaccattatttctcggttattacacaatgttttttagtttcctttctctgtccctagctgcttcttctctccctaacgagatcatccatgcctatgagcgtattggaggtctccaaggattgatttcagttctgactttctttgtatatggcagcatctttccttcctccgacccccgtactttcactttgaatctcactggatccttgtgttcattaggacagcatgattccacagcaatgacagtgacaagccactctcccactcccatgctctaagaatacacatgcagtcacttctgagtgctgtctcagcagttcaggttgcttccgatttgtggctaggccatcgcagcatgtagcatttaccaatgtgcatgccagtggaagacagtgtggagaaccccacctactctggtcctcctgcctttagcttaggaatagtcacatgctttttacttacctgcaaaagaagttgaaaaccgtcctgtgttcttgggacaaggagagtgaagtaggacttggtgaactcctgccatttctcccagatacacttccaacttagagagcaagcctaggtctctcatcagcaccctacccccctctgctggttacatgaaaccctgcttcaccaggaaacctcagaaagaattaatactggaccagggatgttaatcagtggtagagtacttgcttggcatgcacaagaccctacatttgattcccagcacagctaaaaggaaaggagaacaaacaaactcccaacttacacagtgtccccaagtgagcttgatacagttgcaaaagatgtccctctcagaatcttccttctgcaagaacagctgagtaaataattatccagtgctgcaatcaaaacttctatagaacaggacagccctggtggggtggggtagtttctcaagtcctaaaaacatggactggaattccaacaaccgatcaactcatgtgtatgtgaactcttagtgttgacccactttgtcaccatgactgtcaagtttccttctgccgacatctgtctatcttcagggtagtttcttgtctaactcaccatccactgtgaacagcacagtacagtggtcttcaaactggttaccatgtcttccactcctgccactggacaggcattctctacactgtagctagaaggatctggggaaaactctgtttcctgtttagtcttccaaacttaccattgctttttacaatggaccaacatcttcaaccaaactgaatcccaccagggctgacctttgcctgttttccagcctcctctcctagtccttcgtgacgagcacccagaatcagggttagcagccttcctttctcttcttgatgctcctgctaaccctgcaagcttctgatattttcccaggagagtcctgttggctcttgcttaggtgcagtcccactgtatctttcttcatagctcttattgttggtttaactgaatttttctttgttggattacttaactcatgtctatcttatttactggaatgtttgctccattcagacaggaaccatttcagctttattcattttggccatcaccttgtgtgttttctacttatacaggagatgctcctgctgttccacaaatactaaatacttgctctgttaggattcttgagaataaaaataattcctcctttcaaattgtttaagtggaagataaaagacagcatatatagaggtcatgctccaaatgagttggaatggttgacagttatatgccacagacagtaaagatctggaatcttctatcatacacaaccaacaactagcaatttatcaccagctttcccaagtttttctgtgctctaggattaaaatttcttaagggtggaagtgttccctgttaggtactatacattttcatacctggaatatatattttacctaaaattcttattaatgtaatagacagtatactcaatatactgagatataaataaaaattgcttttaaagaattaagatgtattattgcagggtcagtttatgtgcaggtccatagtgtccccttgcctcccagggccacctggaaaacacaactaccatttctctgcccctcaatagtatctgtacaatggcagagcaaagcactcatttcctttttcaggtcttccagagacggaacactgggcagctggatttcttcaagcgttggcggagttatgtagaaggttttggggaccccatgaaggagttctggcttggtatgatctcagagaatcaggaaggtggggttgtggggggataatatccctcttgatgggctggtcagggcatttatggaagcttcccattttcaaggagccattcaagggacagggacactgtgttgtattgggaagggtctggcccagcagggatgggtgaagagataggactgcctgaggtggcttttattccatacctaagctctgcagaatcttctctgagcctggatttcatataactgcagtagaaggacagttgatggatttggatcccaggctctcattaagaggatgtaccagtggtccctgtaattctgctggtacagccagacattaagggcccattttccctctgctctcttttggagcagatgttcatagagagttaaatagccaataaaacatctactgggaaatacaaaaatttaaaaaaaatcgaatctggttattcagtgtcttccagagtagatgatgtttgtgcttagctaggtacagagttccatttgaggtctgaggataggcagttatttcatctattcctttacttttgagatgtgtggacacacaaaagagggctggcttctgctttggagaggtagagccagtgggcagattaccccaatactttgtcctccctgatggcatcccacgatgtcattagcattgccatgccaaagaaataagggtgagaatattagcaccccaggagaaagagttgggaaagctctttattagcagagaagattaaatataaagatgacttttatctctgactgtctcagatgcagacagtgagaactcttacacacaagttgattggttatttgaattccattccatgtttttaggacttgataaactacataatctcaccactggcaccaccactcggtatgaggtgagggcagacttacagactttcaatgaatctgcctacgctgtatatgatttcttccaagtggcatccagcaaagagcggtacaagctgtcggttgggaaatacagaggcacagccggtaagagagatgtctcactatggcagtctccttgttaccatcatctaaggattgacttgccatgtgccatggatgtgggctgtgggatactggtatgcagaggttgggtgtcttcactaacaatgctctctgaaggggcttgagggtaaaggaagcaagaataatttttaaccattaaactggattgtttttatatgttctttcccccgcacctgaatctccttttattctcccctggtttaggctgtttatacgtttttgagcaattttattctgagcctttcagtgaacttccatacacagtgggactgttatgcttgtgtgtgtgtgtgtgtgtgtgtgtgtgtgtgtgtgtgtggtgtatgtgtgagtcttattataacattttgtggtattttgctgtgtattaagacagaaaaatgaaagcaccaagtcaagcagtaagaactttagatctcattaacttacacgacagggacaacacaaagatgagtagtttagccaaaagcagggactctttagcctccattagctgctcactggcttttggccagtgggtggtgtattcagttgtaccgtgaaaggaacacaattaagcatcatgattgaactactgcgattatactgacaaacattttaagaggggatggtgtggttgttggtctaatatggatattttaaagatgatatttatggcttctctgcctttggtctgattctgactttgcttgtagtcatgtctaagtgtgttactggcaaaattagctgattttataggaagcacatggaaagagaagaataacttttgcagaccaagtggtatggtaaataaagagctaaggaatgggaatggtgggtatatcaaggacctgagtggctaggggaagcttcctggaggacatggggatgggattggctcagacagagggccaaacacagacaggaggaaaggaggggcttactacatctgagggtacccaggaggaatagaggaccaacccaaggcaaacagattgctgttttgtagggcatctcaaaattgtatactcaaggatctctgaggtctggggttatgatctgaaatagtcaactacgaatggaaaatgttgaggttctttgctatgtattgtaatgctaaatactggccctcaaggcctggttgtcctaggaatgagagaatctttatgtagacccaagtgacacatgtaaccttgacccccaagttattcctgattggtgaataaagaggcctacaggctatagctgggcagaagataggtgggtttttggttttggggcttggggcttagttttggggggcagggaccataaagggggggagagagagagggggggagagagagagagggagagagagagagagagagagagagagagagagagagagagagagagagagagagagagagagaggagtggagagatgccatggggtaggtgagttatgaatacatggccatcagggctgatgactggagttaagagtggcccagatgcaacatggcaagttaatatggtcattgatagagtagataccaaaaccatagagggtaggtatctgttcagctctagtacataaggcttattataaatataaaggttgtgtgtattttatctgggaattgaatggtcaaaggtgaggtagaaacctctgatagggattaaataatttctataacaggaaaatttctttgagttctataatttcatttcgtaaaaccataatataattttgctcatttcatagtaatctagcacaaaacctagtacagagttagtgagttttaaaacaatgagatttccagcaggattcctcatgtctaatctcgaggacactcaataccttgataggaatagatcctgagtttatttgacaagggactatgggagcaggtgggtgcctgtcaccaaggtggttgcacttgaccaagttggaactgttcaaggattctaagcaggagttacatgggaaagagtgtgcaaggaattgtttctagggaaaataattgccgtgaaacgcaccacagctaccaaggtccattttgctttggattcaccccttccttccttagatggtctgtatttctctgggctagagatgggctgtacagcctgccttccaaatggcacacaaaccgtgggagtcagctctgaaagccaggctactgggaaagtgagtggaaggattcaacacattctaaattaattgactctccctaggtacattatccatattttcagtctgactaggctctggtaactcctgttttaaagttgctcaggccaacgaggccagtcagtgaggatttttttttttttttggtttttgtttttgctttttgttttttaattcaaggagaaagaggcagctcggatacaactgggaaacagactgacctttgttcatgtgattatcagggtagttacagaatgatttaaataatcataatggttattattttttaagacaggctctgatcatgtatcccaggctagcatgcaacttgtaataatattcctgccctggcctcttgagtgttggaattaaggaatatactatcacacacaatgatcataataatttaatactaaaataacttaaattcatagtctcaggggacagagcccattacataactcttaccccacctttaaataaggtcaggttgtgtttctgatggcttctaaatgatctctaatcatttagaataacaaagggccagcaggtcagccctcagtttcctatttgggcctcctcctgctccggtcttagtgtacctgtagtctatctgactatctttcatgctgtcagtgagacttaggctttcctttcaggttagagtctcaattattacaaacctcatacctgagatcttcctggacacgtttgaagtcaggtgtttctcctcggcttccatgtcttctgtttcccccaaacctggcatccttcctagcttcttggttgagacttcattcagacccatcttttcagtttgtccctttctttccctttcctttcttggaccattagacattgccttttctgagtctagttaacataattcagcaaatgagctgatgctaatgggaaagggagtcaacatattcttaaattactgcgactctcctcccaggtaccttatttccattttaactgtgactagggggtaattcccattctaaggttgttcaggccaatagggccagccagtggaggatgtcttttttttaataggaagccttgggagactctcaaatcacatagcatttaggcagccagctagtcttcctgtgtgtgccgtcagtcagtcctaccttgatgtcctgcattacaacagtggggtcagtgccattttagctttccttgtctatgctttggttcagatgagggttttaaaatctaggaagcttcaggctatgatgcagtatagggtagaagacagatgttcaaatggaaggtgaaggtctccctgtctctgtgagtgccatctattcctgtgtctcgcttcattaatgcttttattacaacagagatgcacagcattggtggaaaggagaggcttcaagcttgtccccacctcggactgtccagctggaccgatagcttcccacttccactgaagtcatactgctttttgtttgcttctgcttcttttccttctcctcctctcttctgcttctcctccttcctcttcctcctctcctcttcctccttctcctctcttccttcttcttccaaaggaaacttcagcaaggcaatagaatgttagcttaatttctgatgttgaatcttataggctttcctatgagtcccactgttgggatgcttgcttatgtagagatggcaacacaaacatagactctgtcagagtttccattgggctacccaactttttccaacttatctcatgtccctcttgcatggggttcagccattttagggtacttaatggatgggtcctcctcctggggacacttggcaaagtgactgaggatctctaacaacacttagtagtccaggaatgacaatgtctatatagagctgtcttaacccaaagccagtgtttcctatatttttttaaaaatttttcttaggtattgtcctcatttacatttccaatgctatcccaaaagtcccccatactgtcccccccactcccctacccacccactcccacttcttggccctggcattcccctgtactgaggcatataaagtttgcacgaccaatgggcctttctttccactgatggccgactaggtcatcttctgatacatatgcagctagagacacgagctcctgggggtactggttagttcatattgttgttccacttatagggttgcagatccctttagctccttgggtactttctctagctcctccattgggggccctgtgatccatccaatagctgactgtgagcattcacttctatatttgctaagccccggcatagtctcagaagagacagctatatcagggtcctttcagcaaaatcttgcttgtgtatgtaatggtgtcagcgtttgggggctgattatgggatggatccccggatgtggcagtctctagatggtccatccttttgtctcagctccaaactttgtctctgtaattccttccatgggtgttttgttcccaattctaagaagaggcaaagtatccacactttggtcttcgttcttcttgagtttcatgtgtttcgcaaactgtatcttatatcttgggtagtctaagtttctgggctaatatccacttatcagtgagtacatatcatgtgagttcttttgtgattgggttatctcactcaagatgatgccctccaggtccatccatttgcctagaaatttcataaattcattcttttaaatagctgagtagtactccattgtgtaaatgtaccacatttctgtatccattcctctgttgaggggcatctgggttctttccagcttctggctattataaataaggctgctatgaacatagtggagcatgtgtctttcttaccagttggaacatcttctggagttttctatattttgaaacaggcttttaatggctggtgtttgagaaaaaagaattaatagattcacagagaaaaagaaaggctagatgctcaccactaccctttccttgctaccttcagtcccaggggacagatactccaggcctagtctcacagccctttgtctgaatgtgactcacaggggctatgatgtttatggcttctcctggtcttaggtcttaggtggaggctgcagaatctttatcattctttctgcactataaagcactggaggatactcagagtgacattttgctgagatggtcagtcaccagctcagtggctatactggctggttttgtgagtcaacttgacacaagctagagtcatcacagagaaaggagcctcccttgaggaaatgcctccatgagatccaactgcaaggcattttctcaattagtgatcaaggggagagggcctagtctattgtgggtggtgccatccctgggctggtggtcctgggatctataaaaaggcaggcagagcaaaccagaggaagcaagccagtaagcagcaccctctatggtctctgcatcagctcctgccttcaggtgccagctcttcttaagctcctgtcctgactttgaactatcatctggtagtgtaagccaaataaatcctttcctttctgacttgctttttggccatcttgttttgtgtgttttgttgcagcaatagaaaccccacttaagacagtggctataccttgagtgtgggtttagaccttctatgagtcttctataaccctcccaacccacacctaagaacagtttccagcaaagccaaagaacagggcattttgaatagggttcattagcagtttctcctaacactaatatgagggagtctaagcatgattggcctaactaatttttattcattatttctgagcttctatgtagtccattcgggcctcaaacttgcatttctcatgccttagcttctggggctaaggagtgtccatcacacccagatttaacttggttttacttagggaaaataaactcattgattcagaacaatgcctcggctagagccagttattttctgattcatgagcatagtcattttctatactctgaacaataatttggctttagtttctcaaaggtagaaaatccatattcagaaataataataacaattaataaaaaaaaatgttccaaacacatcaaagctcacttcctttttctagtccagggtccaaggttaggataactgaagatatcttcaagaaagcatttgtctgggtcttggaaaataagctctgggaacttcatattcagtctaggaaagctgtgcttattgaaagaatgttactaggggagccattgtgtgttatttcaagctgtagttaactgtctgtgggaaatctggagggaggagaaaaacgtaaacaaataaagccacaggctgtctttttctttgactggaagaaactcatggaggcgtggccatcttggtgtcgaagcaccaaaggatcctgcctttgctggtcaaggcatgaagggaacaaggttgtgtttgcagacttggaaggacagattgctgctaccttcctgtcttagtgtttccattgctgtgaagagacaccatgaccaaggcaactctcataaagaacattgaattggggctggcttacaggttctgaggttcagtccattatcatcatctcaggaagcatggcagcatccaggcaggcatggcactggaggagctgggagttctacactttgttccaaaggcaaacaggagaagactggctcttctacgctgggcatagcttcaaagcccacccacacttcctccaaggccataccttctaacagcaccactccctatgagccaaacactcaaaacaccatacttccctttgcacaagggtctattaattttatgctagggactgaactggtggccttgatttcctaagtgttcgcctacctcatgccatatccccaactcctatgaactctttgcgtacctgctctaactcaccctaacagagttcttaagaacaagaacctcttctgctttgtattgccagagccaagcatggggctcacccatcacagggaagtgtacatcatctgactaagtgtgtggatgaagctgcagctgtgccaggaccacatgaagggctgttgaagaacacatggctcccagtattttcacttctgtatgcctgggttaaacctagaattcacattttttgtaggttctcaggtaacatcagtgatttaggttttggggactgcctccagaactattgtcaaaggttatcagagatagactgcacttactagtaggaatgaagccctctgtgggagtgaggaggccccaggaaatctgtgtttcataaagaactgacattttagaatctgaggaccaacagttgagtcttgacaatctcagagtcttggtgtctgggaccttcggttgctgtaggtgaacccccaggattttatttccatatgggattcataagagcctggcctaccttgcaggcctgtgagagtcacagcaattagatgtaaatgtgagtgtcattgttgcaggaggggaacttgattaagcccatgattgatatgggctcttattgccttttatgaactgaaaaagcaagtaaacttctaaatggatgacgaatgtggtaggggaaagaggtgccatatgagtgaagtaattaaagcagattccagacaagatgtaacgaagcattaaattgtacatgcgtccccagaagggctctcgaagttcaggtgtgtgcatgtgaatgtgtgtgtgtgtgtgtgttggtaagtgtatgtgtgtgtgtgctcggatgaagggaagataactaggaatcttcttttatagtagagttgagctagactgtaagggaggtgagggtttgaacaatggagggcagagggcaaatgggcctgctcaccacactagtagagacaatggggttggaggttgtgcataagaggcagcccagtgacaagcctgcaaagcaagcaggatgaaccatcttctccatggtagtaggtaggatgctaagcttaagactgtgacatgggtgctgccacagggactgggagatggactgagatccgggaaagttgttgggtgaacacatgtcctcagagatgaaaagagaccttggtggccgctgtgaagaggcaggaaggatgttttgagaaagtaggttagatcaagggtatgttatccaataaagtgaatggattttgggtcaggggcagcagggagaatggtcactgtagtaaatgcagaaggacacagagtgtttatatcaagtgaagggtagtgagaccttccaagtgagaatgctgttgaagttgatggagaaacaggtctggtgtttgagggtcaggttagcaaggataacctgttcatctatatcatgttccattctgagttagttgtgacgacctgtgatacacaactgaatccttggtgttttggtcctagatatttcctgttgggacctcttttctcatagttcttgactcatagttcttttctcatagttctcatagttcttatctctcttgcaggggatgctctcacctaccacaatggatggaagttcacgacttttgacagagacaatgatattgccctcagcaactgtgcactgacgcatcatggtggctggtggtataagaactgccatttggccaacccgaatggcaaatatggggagaccaagcacagcgaggtaagtggcaggcaaacagcttttctatcacaagctttgcctgtctccactcccaaagtgatgtcatcctggtgagattgatagttccccctctgtctgaagctttcagtcaggccaggagattgtgcttcggtcttcatggtgtcaccagacaatggacactacacagtgtacatcgcactatcacacaactattcagctgcatgggagtgactcatcactgatatatgacctatgatgtgaatcgcatgctgtctcatctcattattaagtttcttttgtaatatttttgagccagggtgggtctcatgtagcctaggctgagctcacacttgtcttgtagttgaggaatggtcataaactcatgatcctcctgccttcgttttttaaattcttggattattataggcatctgtcacatctggctaaatttttgttgttgttgttcatctgtttatacagactcttgctatataacctaggttggccttgaactctgaatcttcctgccttagcctcctgagggttggggttacaggtgtgcaccaccatacctagctatcagaccctgttatggatcaggttgtggtaatgaactaccacagattaggtggtttaaaaacagacttgcgtatcttacagttctagaatttcctaatccaagaccatggtgccagccgattcatttttgatagagccttgttacttggtatggagacagacaccttctagataaatcttcacgtgacacagagagaggccatctgacctcctcaatgaacccccctccctgagagctgccccttaatactaccaaattaattgggccaataaaatttcaatacgcagaatttgaagagaacacaaatattaaatcccaaaccagacacttggttgtcttttctagttgcctctccattatagcagagctgtttctctgggtcccttgatgactaggtaaacaggttcggctttgggtcagactcagccttggctccactttaacctaagccaccaagagcctgccacaccctgttcttgtctctgtcaggacagtgttcagggctcagtgtatgtgagggctcctctcttgcaaattttcctgtctgtattttctgggacttccatgacccttgtatgtcatggtgactttttgccagctacaggttatctatgacccctcctggcttcctgaaaattacacttttctcctattcatgtcaatctcttgccctccataaacctgccttgggtttctaatttcaagtcctaggtcctgatcctggctttcaggcagccacctctctccagaactcacacagaccaatattactgtaaatattagcactgctcaaatccaggtgcattcttattactgtagttcttaccacacaatcaggactcccaatccttatgtgatattttttttaaagggaagaagaaatttgcccctagggcaatgaagaaggttggcccaatgaatcatggtggcagcatgtgggccgaccagggaagcctgtgatcagagatcaaatatttgaaatgagcagtcagcatgccctaaaccatccctgtatttgctaataaaagacattcatctggctaatgtgcttctctcgctctgcaagccatttagcttcttgtttattatttacttcacaaattaaaatacataaaattggtcacttgggctctttattggccaggttgcaaggttattaagtgaattaaatattattgtgctcaccagtcaaaagacataaagtgaaatttagttttcagcaggccatttgtcaccccagcgctaatatctaaacagtctaaattgaaaatgattttacacaattggctaattaatacgtttatttttgccttttatttttttgaaaaagaacagggtacggcaatggctgattgactgctctctgcctaagttgatcgtcttgtcaaccttgtgttctggccttccctacatcttgggcacacaccccatcttcctaccacagaggtttctttctctctccactcagcttgtcgaataccaggagagggtacatgatctggaccttgtattttggatcataacccattactgctagaacttcctcttctttttcttcctccatcagagacacagtgatttcttgttctctaggattcccccccccccccacaaaccatcttactcttctcccaaacacttgatgtttgatgtttgttttgcagggggtgaactgggagccatggaagggacatgagttctccattccttatgtggagctgaaaatccgcccgtttggttacagcagagaccgtttctctggcagaaagaagcgctccataggaaaagcaaggatgttctgaaggcttgtctgagctgtcttcacaggagacaagagaaacttggggttggcggggtagatggtgcctaggaagctgaagtttgagggatgctcatagcctccgacttcctagattgctgggtacacagtgctaatgacgtcatcacactttgacctttagaggttccttccatgtcatctgcaagtttgcctgtctctactgagggcttcattgttggctttcaggagccaacaatgttgtaactgaacagtacatatggatagaacacgtgttggaatcacaaggtttttcagcccatccttaatgacagatgtattgaattagggcaaaaaggtgaaccatcctgtagaccatcaattggaaatctttagaaattggtggatatctctgtatccatctgataatatagatctttgtagaaaaaaaaaagacaaagtgaggttctgatcccctgggtgtcagagctgaggcgacctgctacttcttgtctctcctggacctcctggtgtttgaaggaaatgtttatatcttactacttttaaacttcctgtgtgatgaagaatgaagagactacaaaggggccacgatgcagtcatagttaagttctgactagtctctagcattctagagaccaaagctcccattttattgctatttttaactgccccttttccagacatttgcataagttctttcatagatctgcatatgttgtaaataaatttgcagtcatttaaactttaaataacccatctctctaaataactggtcccctcagctccccccgcccccacttcactcacctccatgcctctcccctctcccgggtccatcagccctcagcctccctccttccctgctccccgcactggaagcttcctcacatcatctttcttgcgtgtttggtgtcattttggaaagttttctgtaaccaagtcagtgacctttgaagtaacttaaattcctactcaagaaaacacaaataaactgtttgatttttaaaaagccgtctcttgttattttctccccagagagatggcccacaatagcaatacactcaactttttgcaggcttgctaagcgcgcttaagacattgtcttggtcagtgttctgtggctgtgaagagacatcatctccacagcaactcttataaaggaaagcgtgtaattggggctggctgacagtttcagaggcttagtccattatcatcactgcaggatgcatgggcggcacacaggcagatatggtactggagaggtagcagagagttccacatccagatgtacaggcagcaggaagggagagagatactaggcctagcttgggcttttgaaaccttaagcccccccccccccagtgacacacttcctccaataagactatgcgtacttcaacaaggccacaccttctaatccttttcaaatagtgccactccctgatgatcatacattccaatatataagcctatgggaccattcttattcaaaccatcaccggctagattgtggactccctcttcagatgttatgactcattctaactgctcctaggattgctggcctctctatgtctgtgcagatctatagccaaatcagtgacccatagtctttgttctggaggaggctttgatggccccagatggcaccatgcccatcttaggttcattaaccccagggtttggccactgaactgacctgtgtgggagactgaagctgttttagcatctttttgcttataggtcctttgttgccatggagaaatttcagctgaccttcaaatagtttactctgagcagaaaaggaaatctgggaagttcatttcagagtgtttatagagtgggcaacatccaagcccccacccttcctgcatgctgccccttgctctagcatggtccgtccagcagtttattccaagcttaaaggaggccatcccatgcttcaggatggcccaatgtgaaaggggacgtgagaagtgaggatacactagaagccaggagcagagcatctgtcctacaaacggcggtaaagtttccaaagtgttatctattctgtgcatacacaaggcagagaggagcaaccaagctactggccctggtcaactcttagaacttctggaagatagaaaacaagtcaggacggtggtggtttaaggaaaaagtgagtcactaagagagagagagagagagacagagagagagagagagagacagagagagagtgtgtgtgtgcatctaatcccaccacaaaggctttagggggctgtagtgatggcatcagatctagaaatgcaggtccgtgggtgtgggggggaaagggagttccggtgctctgggcaggcagatgcgggtggactgcttttcacatggccctgggtgggcatctggctgtgttaagccactgaccccacatggcgggtggtggacaaggggcagccccaggtaccaggttctcagcctctcgtatcccacgctggatatggtggaggagctgagaacagaataggggccccagcagcacttggccctggagatgaggggaggaatgggcagggggaggggcgctgggtggttcccacaagggtgagagtccttggtcaggtctgtggctggagcacaggatggccttctggcgggatgttagacgcggcccatcccatccttcaagcacggcgggccttgataatcagagacatatggttttagagctttattgtagaaaggcagggagaaaggagggaaggtagaaagagagagagaccagccatggccacgtggagagaggggggaagggaaagagagaaagagaactagagagtaagaaagatgagggcttaagagagtgaggagggggccaagcagcccctcttatagtgggctgggctatcaggctgttgccaggtaactgtggggaggagcgtacctaggctatagtcaggtaactgtggggtggagtctagccagaatgccagaagcttgggacatggttggtgtgacttagtcacagaattatggacagacacctgattctgtgaatgtggctcgcctttctgtcccttgtagatttctctattgggtcactggagcaagccccattcaaccaaaataggctgcccatcacagtcccacatagaaagacagactgagtcatgagggaagcagccagacatctgagagagccaggctgcacatggacagtatgggggaggcagtgtggcttctcagtggttgaggagcccagggagccagtgggaaggacaggcagggggtcattgctgcaatggctgtcaggtcacattgccattcagagccagcatgagctttgatgtgtgtccttctgctcattgccccttcacaggtcccattccagtgggtctctagtgagttctacgcacctgagcttttcaaagttccccaggggcctctaacatcaactcaggggtgagagtcattgttcccacataagcctttgaatggcggagagctctcagaggcttcgaaaccttgaagtgacacgggaggcttgtattttggaaatattagtttggtgacaggttgaggagggccacagagtggggattttgaaaactacttagaaaattgtgtgtgtatgcatgcgtgtgcatgtgtgttcacatgtatggacaagtgtgtatataggacattaccctgggtctccttttgctactttctacttcatttcctgagacaggctcttattctgaacccagaactcgccgatgtgggcagtctagccagccagtttgttctgtctccagagtataaggatttacttcaggtggggctgccacgcccaaccatcaagtcctcacacctgagtagcaatcacttcttccacggagctatctcccggcccttgtgttatctttggttgacacaaatctgtggggtaaagcatgccattccaatatgcacgtatatgtgaagtggtcagcgcaggtgacaggcatctctatcactgctgacatatatcataccttggtgtggagaacatgcatagacctctctaccggttgctttggaatacacagttagtccttgtcagccatagttactccactgtgattcagaaagtcagaagtcattccttctgtctgtgccccttgcccatccacaaggggtgtggtctagggggaagtggggaggctcgcagaccagctcacagctgctgtaatagttctccaagtagtactgagtcccttggtctgtgtcagaaggggatctatagaatcagcaggagtgagggaggactggcttcagaggccagcctgtgaccacagagcttgaagatgtttatgtgtcacggctgctacctctggaaatggcttggcatttgtgtttgttgagtttgagtgttccgttttataacttacaattattggggattcaagggctactgaagctggaatatactgcaggagagagtgaggaagggggagaaagagagaaacagaagaaaataaagaaagagagagaggcagagacagacaaacacacacacacaatttaggtgtgggttgtgcaaagagagagcatgcagacaaggaggcatgcaaagaactagaagaaaacgtggtgaaaagctgctggtgaaacttagttattagaaaaggtcctcccatttaaaaaaaaaaaaccaaaaaacttacatgtcttcactaccttaggtcttccaccagggtcaaggagaggatcaacagagatgatgggaaccaatcaatcaggttggcgcctgcagtctggggcaagcaggctgctatacccactcttgccagtagatggcagtgttgtcttatcaggtgcctctcaaatcaagagagactctctcccacaaagggaggttctggaagggtccccacttctctgttccttcctgggtaactctgtcttacccagtggggccaagtcagcagccaacctgcacttagtggtttctccggcagtgtttctacctggattaacacaacaggtaagcaggcaccccctggaaggggttgcctagctcattcttggttgtgtctagcctgcaacctctctatcacagtgtgctaggctggtcagtgtgtagaaagttccagggatatttcaaaactcttcctaaaatgcccctgtgagtgaattgtttctgaggacactttaagttccagttccagtgttatataaataaggttaccaggttagctcataaaaccctgctcatttatagaagacaaacttctatataattatatataaagacagcaaagaatagttctgaagcctgtaaactttagctcttattatatttggcttgccagcttttttaacgttttaaaaatatttattttagaattacttatttgattttatgtgcccaagtgttttctgtctttgtatatgtatatacacaggcacatgcttggtgcccatgaggctagaaaagaatgttggctcccctggaactggaattacagatggttgttagctgctatgagggcctgggaaccaaacctgagacctctgcaccaacagcattcgaaacttttgcatgctctttttcctcactaggagatatgaagagcctgttgtaaggctggttttctgtgaattgtcaagaggactatgacagatcatgggtggaagagagagaaaggctggtgaaagacaaggaggttgctggagtgtgggtaattccatgccttcctccatacatttcttttttgatttctagaacacaaaccatggttttccttcattaatgacacttaacttgagcacttaagccaggctcagtgctaagtggtttttcttttttttttttatgtatttctccatttaatttctgaagataagttttaatatggaggtaacatcacaggcataaattacatgtgagaactggtgtgggtcccaggatactggacagccctagtcctcagccccagccctcggtgctcagggactctcgtctattctgccaataatagcctcctttctccgctcacccagtgcaacactttgccagcctgacttgatgccagtcttggtgggtgtgttcctctgggaaagcgacaaacacattatatggttgtggtttgttcctttaggccagttgtgacccttcaggacaaatactctggtatgggctcagtggacttggcacctcgaaagagctaaaatcctttgatatgcatgccctgccattactgaataaatcgtgatgcttggccccatgggaatctgaaaacaattcaataagttgaacctatgaccgatacagtaagttgtccgaagggagttttgttgctgctgctgttcaagcttgtgtgcctgtgactttgaattcaagaataatcttaagggcaaagggcaagcagccagcagagtactccagttgagaatgctaatggatggttgcattgcgcaactctgtcctaacgctccgagtgtgggtgagcctgagcaggcagagttgatggagctggaagggtggtgagccaatgagatgcctgggagttgcactatcgcctctgggcggcccctcctctgcatcagaaactttcacaatattctagagacttgaatagcaggttgaatgaaaattctctgtcccctggttgtcatagctttgtaatgataggagaaaagctgaaggatcagccgaaactgtgaaacagcctgccttgggcaagacaggaagtgtgcagctgcgccgtgggtcttccttctcaagcttccgttaaacagcgcagctgttcactaacactgaattactctttccacaagatgctagcctctgccattcagggtggtgttcctagccatagggtggctattgagtgcttgaaatatggctggcataattgagctctggacttttaatctaatttaattttaatgaacagagccacatgtggctaatagtaccagattgggcagtgccagtcgggaacatttcaccatcttgtttctgttggcccgcactctaggtaagcattgttgggaaaggaatcaagagcatccaagtcatttcattttctaactagggcaaagttgtggttgacttagaaaaaggataaatgtgcttatataaatacatgcacatagacacaggtatctgtgtcccttggtcctttgtttcttagcaccagattaacccaaaggttatttcttccttttcctatgaaagacatggacttcagtggagaaatgttttctaagtgtcgccagggaacatcagtatgttttctgcagccgttgttgctcagttcagcttccaaagtcgcctgctttgcgtagaagggagagatgccacatttctggtcctcagacctgagattctaggaggccagggaccaggcaggaagagcctctgcttctgtcaattctgtgtgagaataatatctcagcggtaagccagtgactcaatccaacgtgcgaggaggatttcattttcaaaacatttatttaaataaacttttatatgtatttgaattttacagaaaacaaaacactgacaaatactgtacagcttcgatcattcatatgagcgattcatttcttgaaaaagtgactggcttttctttacatcttcctgttctttttcctcttcccaagaaatcaaaaaaagtctattggacactggataaagacccctctgactgtttctgagtgtgactaaggcaggccagaagtccagtgtgggtggggacaaccccaatgcccaagtccatgccagttgagaaggtctcttctttatgcatcttcttttcaaattttcgaaaaagatttattttatgtgtatgagtggtttgcctgcatgtatacatgtgtaccacatgcatgtctggtacttgggtcttctacagaagcaacaagtgctcttaactgctgagccattcctccagccccctggggcctcttaggttcttcatgaacttactgtccccagatggatcaggtaggcacaagtcccaagcaccttaccctaggactgtatccgtggcaactctggaatagaccaagggaaacagtgtctgtagagtcataaaggaatgaattggcatgatgcaaggagaagcagtaatatgagaagaattgtcagggtgaggcagggcgacagggcaccaagcaatactttgggcttctgctctctggtgtctatgggagggcctatcacttcatgggccctgtatcatcctaagtgctctatcaaggctgtcggagagtctgcgacaggaagaggtgatccagtcacggttgggattccaggatatagaagcaactgggaactgcctttctggatggtttatgtcaggaactggctcaagtctatttggttagaaagcagtaggtacacttgtgtccagagtcaggggctttgttatggcaatcagggacaactgactgctgtcttaattcaaactggcagccagttgtcacggaaaccgtgtaatttgtatggtccctgattccggcgatccatccttgcagactgttatctgacatcccatttctgctgtgtcttcacctctacccccaagtcttctgtcttagggcaactgagagaagtgggaagagcatctggtgggtaccaattggcagagaaggggagaagactggtcattctgtgacatgcggaggacagccaggtaatccacaaccagctccctatgtgacaagggggcagagaatcaggaagtgttgctttggtcaaagaggcctgagggtggaaggcttgagtgcctagtggcattgaggtgatgtaggatgagcgggtgaaatgtgactgtctgctagaaggcccaggtagccaccattaggtagctaccctccaagggcctggagcacatcgggagtagacatgagtaccaggtggcccagctgaacgtagggtacaactttacattcatagagtctcatcaattttgggaattttttcttgctgctgtaatgtcataatttggctatgtcattaattagacagtgatttttctactgtctataatggtctccatggggacaatatttatagagctccccagtagatgtgcaaatgagccgttggagtataatcgcttccaagctgggaattctctgcttttgtaacatggccacaatacaatcaaaatgccaagcaatttgttttctttgactggggaggaaatgctctcttccactcagaaagtggcatggcttcaggtaccacagggcacatatgtcaatcaaccctggtctcaatgccttgcctcaccttctgtagcagttaatggcgtgtcttaaaagagtaggtcacccaggttgaattgtgaggtattacaagttatccttagcatcattgcatatccatccacagttatgagtacctactgtgtacaagacatttgcctgagcatcaacataaatagcaacagatacctttatagttttatctttcatttaaactatggcttctacctcccactggcaatacattatgcactgctaccaacacaggattgcttctggtatgtgttgtgttgtgtatgcgtgtgcatgtgcaagtgtatgtgtgcatgtgtgatggttatgagactggacttgggatgatcttacttggtttctttctggaagcccttggtcacacggattatagctagctcatgcgaggcatctctccttacgctttctatctctatattacatctcgtgggtacacacctgcaatccagtgaagtgaatatgtgggtttccatagctttctcatagtcactgccaagagctgttcatcactgcttagaaaagggcaccttgctgagtagttatggggtaatgtccccgagaggtcttgggccacattagacatctgttagaggtaatgaggaccttgtcgtgaattgcaagcaaagagctttgagtgtatctggagccatactttaaactttcaggtataggcaaaaggtcagaagcatatagaaaccactagctatgtctgtatcaatatatactgaagtggggactgtaccagggtcttagaatgtccaaatgtatttccagtaaaacattatgtaggaatagaacacacccatctccaacctgaatgatatacagacagtgcatagggccttgcaccatggcttcttaattgcacatatgtgcctaaatctggacatatcttctcataacacatttctgcaagtatatatatttgagcaaaaatatatattacatggctgcgtgataaatagaatatcctgtcccatgtacctgttgtccaaatgtgcatacatatgatacaaacagagttgaaagccatctaagatgcatatgtacatactttctgtgcttttgtgctggagtataccagaaactgctgtccatgcttggggcactgatacgggacacatagctgccaagacagagtaagaattgtctacacgccgcccccatccattgggatgcgtagtctgaaatttgtcccttggttgagtgatctgtgggagtgaatgcatcacgttaaaggctcctccaagtctctgtggttggaaggaggctcggctccaaggggaggacacgctgcccccttgctcactagacaagcagtgatggtctcttctccatctggaggagcttgggctgagcagagatccagaggtcttcatctttctttttcttcttctttttctttttcttcttgttctggtctggctgttggttgctcttaggtggccggctacagcagcaatggcaacagatgaagaagagggtgagaaccaccaccaggggcaaccccaggagcacagccaggcagactgtgttgaagacgcctctttcgtgtctgatccggatggtttcccagacagagttgaagaaagaactgtttctctccatggtgctggtctagtgtggggccagaggatcgtcaattatctaacaagccctcggtgtcacagaacacagtgttagacacttggaatttatttttctctcagcttcacgtttgggcatgccaccaggaacacctg

SEQ ID NO: 831 - DNA, 5727 bp, Mus musculus
atgctcgccttccccctgggatttctgcttgcttctgtgctcctggtggcttcggccccagccactccagagtctcccggctgcagcaacaaagagcaacaggtcactgttagccacacctacaagattgacgtgcccaagtctgctctggttcaaagaccgaccccacagtcactcagcgatgatgggacatcactcttggctcccggggaggatggagaggagcagaacattatcttcaggcacaacattcgtcttcagacaccgcagaagagctgtgacctggcagacagtgtccaggacctgctagcccggatgaaaaagctggaggaagagatggcagagctgaaggagcagtgcaataccaaccgctgctgccagggagctgctgatctgagccgtcactgcagtggccacgggaccttcttccctgagacctgcagctgccactgtgaccagggctgggagggcgcagactgtgatcagcccacctgtcctggggcttgcaacggccacgggcgctgtgtggatgggcagtgcgtgtgtgacgcgccctatgtgggggtcgactgcgcctacgccgcctgtccccaggactgcagtgggcatggcgtgtgcgtgcagggtgtctgccagtgccacgaggacttcacagcagaggactgcagcgagcagcgctgtcctggcgactgtagtggcaatggtttctgtgacactggcgagtgttactgtgagatgggctttactggccccgactgttcccaggtggtggctcctcagggcctgcagttgctcaagagcacggagaactctctgctggtgagttgggagccctccagtgaggtagactactacctgctcagctactaccccctggggaaggagcaagctacaaaacaggtccgggtacccaaggagcagcacacctatgacatcaccggcttgctgcctggaaccaagtacatagtcaccctgcgcaacgtgaagaaagacatttccagcagccctcagcatctacttgccaccacagatcttgctgtggtgggcacagcctgggtaaatgaagagactgagacatccctcgatgtggagtgggagaaccctctgactgaggtggactattacaagcttcggtatggccccttaacagggcaggaggtgacagaggtcactgtgcccaagagccgtgatcccaagagcagatatgacatcactggtctgcagcctggaacggaatataaaatcacagttgtgcccatccgaggtgatctggagggaaagccgattctcctgaatggcaggacagaaattgatggaccaaccaatgtggtcacaaatcaggtgacagaagacacagcatctgtttcctgggatccagtgagggctgacatagacaagtatgtggtgcgctatatcgcccccgatggggagaccaaggagaaggcagtaccaaaggaccagagcagcaccgttctcacaggcctgaagccaggagaggcctacaaagtctttgtgtgggctgagaggggcaaccaaggcagcaagaaagcagacaccaaggccctcacagaaattgacagtccagaaaacctggtgactgaccgggtgacagagaacagcctctctgtctcgtgggacccagtggaggctgacatcgacaggtatgtggtaagctacacttccgtggatggagagacgaagcaggttccagtgaagaaggaccagaggagcaccgtcctcaccggcctgagtcccggtgtggagtacaaagtttacgtgtgggcagagaaaggcgatcgggagagcaagaaggccaacaccaaggctcccacagacatcgacagccccaaaaacttggtaactgaccaggtgacagagaacactctcagtgtctcctgggaccctgttcaggccaacattgacaggtatatggtgagctacacctctgccgatggagagacaagagaggtcccagtgcctaaggagaagagcagtaccgtcctgactggcctgaggccaggtgtggagtacaaggtccatgtgtgggcccagaaggggacccaggagagcagaaaggccaacaccaaggcccccacagatattgatggccccaaaaacctggtgactgaccaggtgaccgagaccactcttagtgtctcctgggacccagtggaggctgacattgataggtacatggttcgctacacgtctcctgatggagagaccaaggaggtgcctgtgtcaaaggataagagcagcacagtcctgaggggcctgaggccaggtgtggagtacaaggtggatgtatgggcccagaagggggcccaggacagccggaaggccaacaccaaggcccccacaggtatgaacattgtagccggaggatgtgacatatttcatgatattgacagccctaaaaacctggtgactgagcaggtgacagagagcactgccaccgtgtcctgggacccagtagaggctgacatcgacaggtatgtggtgcgctacacttctgtcgatggcgagaccagggaatttctcgttgggaaggaccaaacaagcaccgtcctgacaggcatgagaccaggtgtggagtatcaggtcgacgtgtgggcccagaaggggacacaggaaagcaggaagaccagcaccaaagccccaacagatattgatggccccaaaaacctggtgactgaccaggtgaccgagaccactcttagtgtctcctgggacccagtggaggctgacattgataggtacatggttcgctacacgtctcctgatggagagaccaaggaggtgcctgtgtcaaaggataagagcagcacagtcctgaggggcctgaggccaggtgtggagtacaaggtggatgtatgggcccagaagggggcccaggacagccggaaggccaacaccaaggcccccacagatattgatagtcccaaaaacctggcgatcgaccaggtgacagagaccactctcagtgtctcctgggacccggtacaggctgacattgacaggtatgtggtgcgctacacctctgctgatggggaatccaaagaattcctgattgggaaggaacagaggagcacagtcctgacaggcctgaggccaggtgtggagtacaaggttgaagtgtgggcccagaaaggagcccgggagagcaagaaagccaacaccgaaggtcacacagacattgacagccccaaaaacctggtgaccaatcaggtgaccgaaaatacagccaccatctcctgggacccggtgcaggctgatattgacagatacatggtgcgctacacatctgctgatggagagaccagggagattccagtgaggaaggagaagagcagcactgtcctcacaggcctgagaccgggtgtggagtacacggtccaagtgtgggctcagaagggggcccgggagagcaagaaggccaaaaccaaggcccccacagaaattgacagccccaagaacttggtgaccaaccgagtgacagaaaatacagccaccatctcctgggacccagtgcgagccaacattgacaggtacatggttcgctacacctctgcggatggagagactaaggagattccagtgtcaaaggatcagagtagcaccatcctgacaggcctgaaaccaggcatggaatataccattcatgtgtgggcccagaagggggcccgggagagcaagaaggctgataccaaggccctaacagaaattgaccctcccagaaatctccgtccgttcggggtaacacattctggtggggttttgacctggttgcccccatctgctcaaattgatggctacattttgacctaccagttcccaaatggcaccgtgaaggaggtggagctcccaagaggccagcagagatttgaattgcaagacctggaacagggtgtcacctatcctgtttccttggttgccttcaaaggtaatcagcggagccggactgtgtctaccaccctttctacagtggatgctcgctttccacacccctcagactgcagtcaagttcagcagaacaccaacgctgccagtgggctctacaccatctacctcaatggtgatgccagccggcccatgcaggtgtactgcgacatggacactgacggaggcggctggattgtcttccagagacggaacactgggcagctggatttcttcaagcgttggcggagttatgtagaaggttttggggaccccatgaaggagttctggcttggtatgatctcagagaatcaggaaggacttgataaactacataatctcaccactggcaccaccactcggtatgaggtgagggcagacttacagactttcaatgaatctgcctacgctgtatatgatttcttccaagtggcatccagcaaagagcggtacaagctgtcggttgggaaatacagaggcacagccggggatgctctcacctaccacaatggatggaagttcacgacttttgacagagacaatgatattgccctcagcaactgtgcactgacgcatcatggtggctggtggtataagaactgccatttggccaacccgaatggcaaatatggggagaccaagcacagcgagggggtgaactgggagccatggaagggacatgagttctccattccttatgtggagctgaaaatccgcccgtttggttacagcagagaccgtttctctggcagaaagaagcgctccataggaaaagcaaggatgttctgaaggcttgtctgagctgtcttcacaggagacaagagaaacttggggttggcggggtagatggtgcctaggaagctgaagtttgagggatgctcatagcctccgacttcctagattgctgggtacacagtgctaatgacgtcatcacactttgacctttagaggttccttccatgtcatctgcaagtttgcctgtctctactgagggcttcattgttggctttcaggagccaacaatgttgtaactgaacagtacatatggatagaacacgtgttggaatcacaaggtttttcagcccatccttaatgacagatgtattgaattagggcaaaaaggtgaaccatcctgtagaccatcaattggaaatctttagaaattggtggatatctctgtatccatctgataatatagatctttgtagaaaaaaaaaagacaaagtgaggttctgatcccctgggtgtcagagctgaggcgacctgctacttcttgtctctcctggacctcctggtgtttgaaggaaatgtttatatcttactacttttaaacttcctgtgtgatgaagaatgaagagactacaaaggggccacgatgcagtcatagttaagttctgactagtctctagcattctagagaccaaagctcccattttattgctatttttaactgccccttttccagacatttgcataagttctttcatagatctgcatatgttgtaaataaatttgcagtcatttaaactttaaataacccatctctctaaataactggtcccctcagctccccccgcccccacttcactcacctccatgcctctcccctctcccgggtccatcagccctcagcctccctccttccctgctccccgcactggaagcttcctcacatcatctttcttgcgtgtttggtgtcattttggaaagttttctgtaaccaagtcagtgacctttgaagtaacttaaattcctactcaagaaaacacaaataaactgtttgatttt

SEQ ID NO: 832 - protein, 1573 aa, Mus musculus
MLAFPLGFLLASVLLVASAPATPESPGCSNKEQQVTVSHTYKIDVPKSALVQRPTPQSLSDDGTSLLAPGEDGEEQNIIFRHNIRLQTPQKSCDLADSVQDLLARMKKLEEEMAELKEQCNTNRCCQGAADLSRHCSGHGTFFPETCSCHCDQGWEGADCDQPTCPGACNGHGRCVDGQCVCDAPYVGVDCAYAACPQDCSGHGVCVQGVCQCHEDFTAEDCSEQRCPGDCSGNGFCDTGECYCEMGFTGPDCSQVVAPQGLQLLKSTENSLLVSWEPSSEVDYYLLSYYPLGKEQATKQVRVPKEQHTYDITGLLPGTKYIVTLRNVKKDISSSPQHLLATTDLAVVGTAWVNEETETSLDVEWENPLTEVDYYKLRYGPLTGQEVTEVTVPKSRDPKSRYDITGLQPGTEYKITVVPIRGDLEGKPILLNGRTEIDGPTNVVTNQVTEDTASVSWDPVRADIDKYVVRYIAPDGETKEKAVPKDQSSTVLTGLKPGEAYKVFVWAERGNQGSKKADTKALTEIDSPENLVTDRVTENSLSVSWDPVEADIDRYVVSYTSVDGETKQVPVKKDQRSTVLTGLSPGVEYKVYVWAEKGDRESKKANTKAPTDIDSPKNLVTDQVTENTLSVSWDPVQANIDRYMVSYTSADGETREVPVPKEKSSTVLTGLRPGVEYKVHVWAQKGTQESRKANTKAPTDIDGPKNLVTDQVTETTLSVSWDPVEADIDRYMVRYTSPDGETKEVPVSKDKSSTVLRGLRPGVEYKVDVWAQKGAQDSRKANTKAPTGMNIVAGGCDIFHDIDSPKNLVTEQVTESTATVSWDPVEADIDRYVVRYTSVDGETREFLVGKDQTSTVLTGMRPGVEYQVDVWAQKGTQESRKTSTKAPTDIDGPKNLVTDQVTETTLSVSWDPVEADIDRYMVRYTSPDGETKEVPVSKDKSSTVLRGLRPGVEYKVDVWAQKGAQDSRKANTKAPTDIDSPKNLAIDQVTETTLSVSWDPVQADIDRYVVRYTSADGESKEFLIGKEQRSTVLTGLRPGVEYKVEVWAQKGARESKKANTEGHTDIDSPKNLVTNQVTENTATISWDPVQADIDRYMVRYTSADGETREIPVRKEKSSTVLTGLRPGVEYTVQVWAQKGARESKKAKTKAPTEIDSPKNLVTNRVTENTATISWDPVRANIDRYMVRYTSADGETKEIPVSKDQSSTILTGLKPGMEYTIHVWAQKGARESKKADTKALTEIDPPRNLRPFGVTHSGGVLTWLPPSAQIDGYILTYQFPNGTVKEVELPRGQQRFELQDLEQGVTYPVSLVAFKGNQRSRTVSTTLSTVDARFPHPSDCSQVQQNTNAASGTIYLNGDASRPMQVYCDMDTDGGGWIVFQRRNTGQLDFFKRWRSYVEGFGDPMKEFWLGMISENQEGLDKLHNLTTGTTTRYEVRADLQTFNESAYAVYDFFQVASSKERYKLSVGKYRGTAGDALTYHNGWKFTTFDRDNDIALSNCALTHHGGWWYKNCHLANPNGKYGETKHSEGVNWEPWKGHEFSIPYVELKIRPFGYSRDRFSGRKKRSIGKARMF

SEQ ID NO: 833 - DNA, 91279 bp, Homo sapiens
  misc_feature (1)...(91279): n = A,T,C or G
gagggtctctgctcatttctttctgtgctaaaggctttttcccattttaaaagcagtaggcaggaagtcccagaatgcctgaaacaggaaaaagagaaagaaactttataaatgcacttttgaaccccgagacccagctcctggccaggagacaggcaaactcttttaatatccttattctggattcacttaaatggaaacagcctccagtatttttagctgctgtgtaatcaaagtgaaaaagaagaaggaaatgtatatatttttctttcctagttagaataagagaaggaattgctcattatcttttagcagagtccctgctaggaagggaggaaaacaccaggagtctccatttgctcctcctctggcctagacaggatttaaacccaggaagggaagccaaggagagacgagaaccagggacgaccagcaagtaccaaggtctgcggcaggaggagaccggctcacaggagcagcagcattggaagaggcacccagcagcctcccaggtaagagtgccagttgcccaagctttacttactggagggagggaggtggccaatgcagatgagctcaaaagtggtggctcaggtgcctccgttcccgagcctgaaaatccgggcagtgtaattagtctcctatcacctccatgaagagttaaaatgaattgggaagtacctctcaggacccgtgtactgcatccttagtattatactccagtctcagacagggctaagcatagttatcctctttcctgcaacacagatgcgtctgtgttgtatcagcttctacctggcgtaacacatttttgtataaaatgtttcctttaagatgttccttctcatttttttttctttttaacttacttacaatgtcaaagctttctctctctctgtctttttttggataatttagtattgttgtatttcattattcttttaaatcctaaaacagaattgttattttagttatgattaggaagctatgataactttccctttgtctggattttgtgtgaatcagttaaggggatgtttgcaaacacatttgaacagctttgaagtatctccagacatttaattttacaggttttaattattatttgttaagacgacaacttctctcgaaatccccatactattaccctcacaatacctcaaagaaaacatttcaagacatctaaaaaaatgatgtggttggccgggcatggtggctcatgcctgtaatcccagcactttgagaggctgaggcaggtggatcacctgaggtcgagagttcgagaccagcctgaccaacatggagaaactccgtctctactaaaaatacaaaaaattagccgggcgtggtggcgcatgcctataatcccagctacttgggaggctgaggcaggagaattgcttgaacctgggaggtggaggttgcggtgagccgagattgaaccattgcactccagcctgggcaacaagagcaaaactccatctaaaaaacaaaaacaaaacaaagcaaacaaacaaaaaaaactagtttttggaggtcttactttttacttatttattaatttttgtgcttgggagagatctgggggaaggatggagaaagaatgaatgagaacaggcagggcttcacttaaaagcatgaaacctgtgttgcttatataagcattaaaaaaaagaacaagttccaacataaaagtaacaaactgcccacattgggacacaggttagccacagtgcctaaaatccactggttcttggaaaagctgaggtgtcaccaaggcatcagatgataccttgctcggtcagggctacgtattggcagctggcctcttgacattcagacatttgttgcagactcagaatcaaggtgacagtgtcagacacaggaaaaaatagagtatcaatactggtatcatttttccaggagagaagggaagaaggcacctggcattctttcatacaactctaagtactgctttgtccccagtttataggctgcagctgactcccgaaggagggaaaatagaacaaatgatttcaaatcatcccgtggcttctggttttccagtccagtgctgctctgtggtttgaaatgtagggtgggcagagctctctttctgagaagatgcctgaggaaattgtgcccaggcccagtggaaacttttgtccattcactgctcattccagagccttggctcctataggatctggatacagacatgagatcatggtttaggtcctgtagccacatctggagccaccagtctgtgagcagaggttgctaagatctcaggcctgatctctggatggacagggactttgctgcttctgccacagtggactcactgctaatgctgcccagccaccatttgaatctgtacccagcgagtgtgagtggaacagtgcaaatgcttggaaattagcaaacgctctcctccttgctagaagactggaactttaaagttacttcaatatgtggaaaacaacacgttagctaaagaaagaaattgcagagttttttgttttgttttgttttaatctgacgcccctcacacccatggatattagggctaattgtatacaaagtaatatttagtcattctggggactggctgtttggttgaataagggagaggaaggttcctgaatttaggtcccgtgtctattttatcttgttattgtgcatgagcttggtcccacaaaagctaaaggaagttcttgctgtgagaaagtgattcattctctgggggtaaatgaacatctttgcctgatgtccaagaggagattttaaagtgctttgcacagagcctggcatgtaataaatgcatagaaaatggtagctaccattatcatcactcatttgagcctttgcaaggcagattaagagtcagttgtcaaaacaaaacaaaatgagcctgtggtcacccctgaaaaagtgattgagtgctgaggctgggtcaggacaccatccttgatcttttcaagcctcaggcgggtgggcagacttgatgggatggctctccaggaaaagggttctagcacggtggtgtgagagtcatctccaaggacttcctggacactccctgggtatcccacagaactaggagaatggggggacagagtgatacccagaatgtgaccatactaagccctatcacataaaaccaaatttccattctcttccatacttagctgtcttgtatcctatatgcaatcctatattcaacatcacagagactagaaataaaaatgtttgtatgtacttgcttctactggagtttaacctaggagagacagacctcccttgtatatccattttcttggatctgaaggagaaagagatacagaggtgaaatcggtcccctaagcctctagttcaaggtgagttgagccagggtagattcctcagccagctgagaacttgctgtcctggaccaggttacttgggaagtacagggaaggcccctgagtcacccagggcccaagctgcagatcattagcaatatatgccaaagagagttaaggaaggagtgacaagtttgccagtgacatttgtgacattgatgcatccctagccactcatctccctcattttccttcatagtttaatgatatccaccctgtcatttggggacagaatatcttcttaagtgactctgttggaaatccatgatgatacactttttctaaaacccaaagcagtgctttcattttcctgtggttaactgtcaaggcaggatgagataataagggaaccagagaaagccctgaatttaagtataaaggtctgtaacagtggctagaaattggctacctctcttctttggcgtaagtagtattttttttttcctgacccagggtgtgtgtccttctttggggaaaatgaggtgacacagaaaccatccacccctggggtccaagaggaccatcaggattcaggggccatcctcctcccttggccaaggcttggatgccatctgcccctgcagacagaagtatctgtgcactttggtgtttcctaggaagggaattctccagcttctcatgagaattgactgggacttaacctctatgtgagggaaatgcaattcatgtccccagtggatcatccttggcaccactcagaggaagtaaccctctcttaaaaacacatggcagaacggaggacatctggtgttttttttgtttttgtttttgttttgtatatacaggacatataacagacagatgaagaacacagacgcaggcagtggacagacctggtgtgtgatcccagctctgctgctttttagctgtgtgtcctttggcaaattacttaacttctctgaggacctgtcacaaagaatgatatcaactgactcccaggactttgaggattaaatgaggataatttttatagcgtttggcacaatgtccattatctaataagcacacatacacagacacacacaaatccagtggctattactacttacttcacaaaatattactttggcaggactgtgctatgaggctggtgatacagaggggatcaacacagtcatggccctctctgtcatctctgagctcacaaggatacctgggctagaaacacgcatacagatttggcaactgtcaacatttggctggaaattaaagccacaggggtagatgcagataccaagagagaacacagcagaagcatagagccctgcaacatctgaaggcagaagtagggggaccatccatgcagcccatggtcagtcgtgtactcctcaaagagcctttctggtaaaagcaacacaaggcagcatttgttcctgagtctaatgtatccctccctcccaccttcccacaccacccaacaccccttctgcagtcagaattaaagacatgaccagcctctgtaagacaatgattcttggggacaactggtttcctgtggttcctgcatacacatttcctgcatgtaaatgcccttcgcttcatgcatccctgcagaatttacccaactttccatgggaaaatacccctcagcagaataatcctccctatttggaaatgtatcatcctgcgttttgctcagaaaaatcttctgccctgtctgccccctccccaccctcgcggagctcagcctgtggtttgctgtgcatactgaaagagtcgatgaagtcatccttcccttctgctgttaaacaaggagtctctttcctgccacgtgttggagtgagagccagcaggcttctcttcttgctcattacacttgacagaatgttaggttgaggatttcccttgctctcatcttctttcgaacaatcaacctacccaggaaaatctgagcgcaacttgtggaatctgagaggcagtaattaatgaggacatcttgttacaaatcagaaggacaggcaacaccaagggctccaacagggacttgtgggagttctcatattccaggctacaaaaacaaatgctgtagacctgggctctgggcagccttactgtggttgatggcaagagtccacggcttttttttttttttttttttttttgctttcgttgagaacttcttcagaaaaccatctgcacttcatttatgtctcaggctgggggtggggggtcggatggaaagcacgggcagagaagtctgctttttcagccctatttttgcccaggaagaagatttttggacagtggaaactcatgtgctgccatgaacacagtaggtgctttagagatcaatatgcgttgttactggtgaacggcagaagtgtatagggattagtggctccattgctggacactgtgcatctgggattgcatctgtggccgtgtgctcatcaattgcataatcagttgctcaatgccactgagcctcagttcctatcctggggatcaagtggagaatagcgtgtggcttttatctttgtgatgaacgtctaaggatggccgttgtgaaatatcattatttttatcctacacctgccttccaactcattttcctggcttcccactccccccatcttctgacaaaaatctcaagcagattccagagcttttctggtggcttttggtcttagaagagaattgcttttgtgaaagcaagtccatttcagtattgagcctcagtctctcatccaggccacatcttttcttctttctcagctcagacctgatgctggaacctgcagagaagctggagggaaggggcttggggctttcctccctccacttctctctccttaacatgcatggctgcttctggcttcaccagtttgctgctgcctggggcgaggtgagggttagaaaagaagggagagggcacttttactttactggggctgttgtggttccctctgttggatgcccttgttatggtgaatgcttccagtgctgggccacccctcctttgtggggagcttctgtgggatctttagatattccccttcccacccactgggcatgtcctgctgcagtcgcccccttggggtggcacactcctgctgaacggtggacctgcacctcagctcgggccctgaactgccctcttggtagctctaacatgcctcatttctgtgacatcaacttggcctcgccaaagtctgagtttcagtcctctcacactgcagcccccttcctctctctgccatgcagcctgttccagccaagcttccacctgtgaattcctccgggccagaatcaggcaccagtctctttgcctgccacccccactaattcaccgtgaccccacccccaacccccaaacctccagtggcacactgtctttgaaatgtgtgggcacggccaggtgtagtggctcatggctgtaatcctagcactttggggagctgaggtggacaggctgcttgaacccgggaattcgagaccaggttgggcaagatggtgaaaccccatctccacaaaaaaaatacaaaaattagccaggcactgtgacatatacctgtagtcccggctactcaggaggctgaggtgggaggatcactggagcccaggaggtggacattgcagtgagccgtgattgtgccaatgcactccagcctgggcgacagaatgggatcctgtctgaaaaaaaaaaaaaaagaagtgtgcaggcacttattacccatggtccaagtcacaagacaacaagaagtgtcccattgactattccattccatctgccgggtgttgagtccagtgcctgaaatgcagtcagttctcagaagaagtgagcttttattattatcaacaatacatgcttttggtgataggaagagccatgaaggagtgggagggcaaaggggtaacacaaagaaaaacccttcataggtaccattctgcttaattcacagtggtgtcacatcccttgggtacaacatgtataatggatgaaagcattgcatagggacatgtatctaactgcgctcatttgtcatttgtatcagaatgtcatattggcacagagcaagcataggcttgcaatcagatgggtctgcgtttgaatcctggctctgccacttcgttgttgggcaaccctggcaaatgactttacctctcagatctggtttccttaccttttgagtgaggagaggaacactgaccttacatggcagctctggggattaattacgaggaataatgcacccagccaatgcctagtgcgtagcagcaactcagtaaataacatttagcatttcatgctattgtgattcttcttcttcttttattcttccagggctcttcaccccctgtttcctcaacttcctgatactaaatgaatgatgactattaaaattaaacattttacatattactagaatttggcttagtggctagaaatatttcttccttttataatcaatatagttgaaagatgcctttcaacctaggcgttattattattatttgagatcgagtcttgctctgtcgcccaggctggagtgcagtggcatggtctcggctcactgcagcctccgcctcccgggttccagcagttctctatctcagccccccaagaagctgggattagaggagtgcaccgccacacctggctaatttttgtgcttttagtagagaaaggtttcaccatgttggccagactggtctcgaactcctggcctcaagtgatcctcctgccatggcctcccaaagtgttgggattacagatgtgagccaccgtgcccggccagcattattctttatagcagaacagatgaggaagaaaaggaagtcacattcagtaaatcgattgaaaataaaataaacctcaaaattttgactaatccttgctcacataccagacatagtgctcactgctgttcacatctaagaggggtgacgcgctgtcattcccacgttacagacaaggaggcggaggctcaggatgaggagcatttttagggatgcacatcctacagcctgtctgaggtgcctttccaccatatcccaactgcctctcaccacgggcagggagagcctgtgctcaagcaaaacacagaccacaggagaggactgtgtttcctgacttcaaattttggcataaataattgcaggtcttgggttagttacagaaacccattgtcaagagacagctctgcagatcactttctagataactgctgctatgcaagcccaactgggatgtatcttgtgactgaggttcctgtgagcaaaatgtgaggtgaaagctgggtctcttgtggtctgtcctgcctcagcttgttagtgtgcaaagaatgggccgtcctagatgggggttgggggcacaaggggaaatggctggagagagtaattctgctcattgacagtggtgaagacaccacctcctggtgaaggaggaggaaaaacctaaccacctgccccatctcaggtcgcctggcttgactgacaaaccaggccacccatgcacggatggatttgagaaacagtgaccaaacctctccgcatgtgtgacagtgctcctgccacaggagggccccaagatgaatcagcccagtcctgtccttaacaggctcacggcctaagacaagctgcatacaagagtaactgtaacaccaggtcaacgctcaagagaccagcagtgagggacaggtccatttctctgaatgcttagcagaagtgaagctagtctccagctgggtaaggcagggggacaggagagaagactttgtggagcaggtaattttattagaaattcttatgttttactggttcacaagtgagtgtcgtgagcaggatgctggccctgcagtcagtggacttgggtctgagtacaggttctgctcttcctggccgtgggactcaggacaacttgctcagctttctcatctgtgcaaagcagcatggcattgtggggatcagcatggactctggggtcagattgcctgggttcaaatcctgccactctgagctgggtgctggttggcaagtcatttaaagtagtagtgcttcagtttccatatctataagatgggggtcatcatagtatattccaacaaacaattgtgagaatggaatgagttaataaatgtgaaacacttagaacatttagaatagtgcctgtcacatagcaagtgctctatgtgcagctcatattgttgatgttgttaaaagggaggataatattagcgttgctgtaaagatccagaattagggggatcaaagcgtggcacacaataggctgtcaacacaagagagctgctcttcttattattaataagtgcaggtgagcctagaatgagaggtgaagagaagggcatcctgggcagtgtgaacagtaagcaaagagaggaggcaggaatatgcaatctgtgaggcaggaacagaaagtaatttggttcggatccttgggagaaatagaatgagttctttctgctggtttcccagcttccttgggctcttagaatctggtaaaaaaaaagccagcttccctcagcacatctccgtggctttcttttgcaatgtttctgaatacaggcatcctggagggtctgctccctgtctttccaaggatgagtctccaggagatgttccgcttccctatggggctcctgcttggctctgtgctcctggtggcttcggccccagccactctggagcctcccggctgcagcaacaaggagcaacaggtcactgtcagccacacctacaagatcgatgtgcccaagtctgccttggttcaggttgacgctgaccctcagcccctcagtgacgatggggcttcgctcttggccctgggggaggccagggaggaacagaacatcatcttcaggcacaacatccgccttcagacgccacagaaggactgcgagttggcaggcagtgtccaggacctcctggcccgggtgaagaagctggaggaagagatggtggagatgaaggaacagtgtagtgcccagcgctgctgccagggagtcactggtgagctcaccacctggtattcattcaacaaacatttgatgagcacctattatgtgccagggtttccactagcctcatgagcactttgtgactctggtgtgctcctacttctcattctgggttttctctagggggcccatccctgctatttattcatttattcactggtactagctccagggggcatctggaagctgagcagggagggaccagcagctcttgcagagagtctagactcctggcctattgcttccagatgggaatgcttccaggagccgtcatacctgtgaatcaaagcgctactcagagaggaagcaatgggatacacaggaaagatagggccttggagctagacaagacaggttacaaatcccagttctaccactttttagctgtgtgactttgggtaaatcccttatgtttcctcaactgtccaacagggatgattctatcagctagtatagttctgagaactagagatgatgtgtagaagattcctggcccttagaggaatttacaaatcagtaaattataattattttattagtaaaaattacaattataattgtaaaataattacaatttaattttacaaataatgaaggttctcccccaacgcaaccccgtcacttttaaacataaactgcccaggctgatccaatgataatgaacagtactttggcataggatttcatgcctgaaggaattgctatggtaaagagcaccttaaccatcagatccagatacagaactcggcaccagggacactgccatgaataaccagcatggacttgcttctgaggagctcccactttggaagcgtttttaggaaggaaagaaggtgttctgaaaagcagaagctgggccacagaggagactgcactaaccagtctgccctccagctgcctcttgctgtgtagggtcagagaggggagcctggttaaatcccttctccactgtacccatagttgagagtaggctattttgtagcttctgcagttccgttttttccagacttcaatctgggctcatttcacaaggtcccagccttgctagttccagcaaactccaacctccctggatctcactttccccccaggagtcctgccctgcagtgtcagctggccagggtggagcatttaaggcccctccataggaaggcactaaataatgaccaccaggtagagaggaaggaaccggggaattcacacgggaagggaaaggaaagaagggtgggtcctgcagccttttcaggcagagaaagaaggagacgtttgcagatgtcacagattagaaagcctggcccaggctggaaagggccaacaccttttctcccttgtggagctccaccatcctccaaaaaatagccgtgcaagacccagaaatcaccagacccttaagagtggggctaatgatttctgggtcttgcatggctgatctcagaggaaggagatccccacgcacaacccttcaacccaacctactgtttctcctctccctcccagatctaagccgccactgcagcggccacgggaccttctccctggagacctgcagctgccactgcgaagagggcagggagggccccgcctgcgagcggctggcctgccccggggcgtgcagcggccacgggcgttgcgtggacgggcgctgcctgtgccatgagccctacgtgggtgccgactgcggctacccggcctgccctgagaactgcagcggacacggcgagtgcgtgcgcggcgtgtgccagtgccacgaagacttcatgtcggaggactgcagcgagaagcgctgtcccggcgactgcagcggccacggcttctgtgacacgggcgagtgctactgcgaggagggcttcacaggcctggactgtgcccagggtgagagcggagatgtgccctcgggccgccggactcttctttccaatgcaccatttaaccctcaattacacgttgtcatctttgggggtctcttcctttagcctacgccagattgctgagtcccaaccccagagtttctgattctgcgatggggcctaagaatttgcatttctaacaagttcccaggtgatgctgatgctgctggttagaggccctaaccttgaggaccactggtcttgtgatctaatggctgtgtgtgagtgtgtgtgtgtgtgtgtggtgagggggtcagtattaattacctgtcgttcggataataacttctaggggtcgggaatggcgccttacacaggtctgcatcctgcacacccacccttatagtgctcagggaatactcactgggtctggatcgcctcccttgctcaccctctctgccctgttcctgttctgcctgcagtggtcaccccacagggcctgcagctgctcaagaacacggaggattctctgctggtgagctgggagccctccagccaggtggatcactacctcctcagctactaccccctggggaaggagctctctgggaagcagatccaagtgcccaaggagcagcacagctatgagattcttggtttgctgcctggaaccaagtacatagtcaccctgcgtaacgtcaagaatgaagtttctagcagcccacagcatctacttgccaccacaggtgaggaagccacctgatgccccagggttcccaggagaggccccattctaaatggtttctttcattaaacacctgtaggcagttgccttgattaggggtttgaaaaacacacctgccacaatcctaggttctgaagagtcccagttctctctcttctttccttgctccctgattactgggttctccaagcccatgaagacctgctagatgggggctcatggggtcttctctgtccctgagattatttgggtctgcaccttctcataagcagtcaaagtgtagacatgaatccccagtctcttactgaacccccaaagccattcagaaagttcagataggtatgggtgagaggctgctgaagccacctgtatcagttagattcatcttggtgggaaagacaggacacaaatggggtaaatgaaatttcaaagtttaactaacagattgttcacaaaggtgtgggtaggggttggatggtgacacactaagacctgcatcaataaggatactctcctgcctgaaggggcaagggatagatgttggtacttggacccagagagagctgtagaaaagagctgcctggtagggttgttttggtagagggatgcaggcagtccaccgtgtctccaaagaattctgtctcctgccctctgatctgctggtgattcctgctagctgaacctggaagccaaagggtcaggtaaacaggcagactcaattcacagagatcacagcctggggtacagaacaagatggaggatggtggaggcttgatctggagaaacagaatctcctgtgcaccagcaaatgccaccaaaatgtttagaaggattagcatcactgcttactctttaaacattcttgtctcctcgtgaacattcttaaagcagcttagatcttcaaggatttggagaaacgtagttggttgaatgactaactcattccttcacacagtacatttttattgagcacttaccatttgtcaggcactgttctcggtgctaaaaatgcactgcctccatcctgccctaaacttctagggaaagatctaggaagatacagatggatggaactttggcatgcagttgtctttgcagagacatcaagctgcctgtcctttatggtggtgggactagggtggaggtggggatgggtcagtgttggaaagggctgtgagagacttggccatcatgaggtcaccatatgtgattacctttgtcagtgccctcaagctaaagacccccaggagcacccctgtagttgaacaacttgggtgtcttgattgttctagcatgggtgactgcacactatgggggaccatagaggtatctcagtaagacagcgttagaaaggactggttagagaatctgggcctgtgttaggtaatttgggggaaggtgtaaggaagcagggattgggtgctgtcaagaagtggggagagcctctcccctctgagaggctgaagttggtgattgtaacagaagtggccatcactcatagtagtcaggagagtgggtgttcagctatttgtgtggtttggacaatggtcatgtttttgtctgtgttcagagttgatcatggaagtgtcttgtttttgtcttgatctatgcggtcacagagtgacctgacattgatgtcctgtgaaatggtttatgttcaataggagacaccaagtcctcactgtgggagccaggcccattctggctggcagagtctgcttttctctttttccccattttgtctgtggctgcctctggtacagctagcactgtgtccaaagcctcccagtgcagcacagagatgcctattctgaaagtcctagcaacccctcatccatcttgctctcgggatttgtaaaattctgcaagtgtgaagtttctctttctttctaatctgattcaggttaaacacattcttatttgctcctcaggggagcctaagacaagaggtactcatccccaccataatcgtgaacattctcattaagtccttgctttttcatttgtgattccctcccaattcttttacaccatgtaggaactcttatataagcctcaagtcacatttattactcacctcttgacctggccttcagggaattccatctttaatgggagtctaaaaacagcacctggcagatggaagccagtgggtgagaggaaaagcttcagagaaaaggctctgtgaggctctttatccataactgattgaatcggggacgttcagagcccagggaccttgagatcactgagttcacacctggcctgacactaattctcgatccttcatcatccgtcagtggtcagtaggcctgggtggagacacctccagggaggtgaaggtgggggcgtgactgatgaagaggggaagcctgagaattggagggccttggctttcctgtcaaaaacttagaaggccaggctccctcagcctgggatatggctgttggaatttgaagtgcttctcaaagaccctagtcctcccatccctagaaaagttctccccttagagctgtagcaatgatccattcctttgtattaatcactgtaacttcatgtttttttttttttctgagtagaagagtaaacatttagccgttaatactttactatgaataaatgtatacaataactctcttccttcacaggacagacagattgggcagcatgagaataccaggtaccagatggaagtgctaaaattggtaaaaatagcaggaagtacactcagatggaccaagttaaaattcacctactttatagttttgcctagggttcatccttagaggagaatttgagaggcaagggctgcaatttgggagatggagaaaggagcttgttggattaccaatgttgtccttgagaaagtttgaaatagattctctccactttccgtggaagtgcctgagctgcttatcctgaggtcgtcttagagggcaggggctctgcagctgaagagtgggcctttagttcagggctgtagctgtcagagctctggactgagtggtttgggtggccaacctgagaggtacagtttgggcttggccaaagtcagtgtggacagggaagaccacatggcctctgatgggatggggaagtggaggctttcccaaaagacagtctgcccatggaatatgtgaaaaccagcagcttagttgctactttggtagctcaaagacacctgctaagaactgtgtcctggggctgaagccagctcttgagatgtcaagaaagggagctgacctgataaccaacagcctgtcacagaaccttggaacctctgctcttcaccactttctcttgcctccgtcacccctgccctagaccttgctgtgcttggcactgcctgggtgacagatgagactgagaactcccttgacgtggagtgggaaaacccctcaactgaggtggactactacaagctgcgatatggccccatgacaggacaggaggtagctgaggtcactgtgcccaagagcagtgaccccaagagccgatatgacatcactggtaagagccatcactggaatgtgagatgtatgctgtggatgcagaggtggggatagtgtgtgcagagggcactggcatctgcactgctcaagtgtgcacagacagcccaggggccttaggaatcacacttgaatctgacccttgaatctgccagacataagcccacctgggaggcctgtagactctgccccagcattccagagctcgatcccagggcaccttgttaacagattatatttgtgagatgttctccaagtcagcaaactctcttgaagaccctgtctgtgtctcagaatggatttgatggtgtatagatattccttttggaggaactttagtatttgggtgttggggacaggagggaacagaaagagagagagagagattgagattggtttgttgagcatgatgcatggaaggggttgtgttgggggatgtggaggggggcagggtgcagtgagcaggggtggctctctgtctctgatttctgagctaatgctgccaagagctagagctcaaatggctgctaaggaaacaaggctgcagggatggatcaagtttggcagtgcttgaagtctgtacaattccagggctcttttttaagaaaagtaatacgcaatcatgaatacccaatcaggtacaaggccttggaatgggcccgtgaaagtgtggggcttattagcttcatggtaaattccctcctggagccttgttctgctgtccactccttgagttctgtcttgacaggacattttggggttcttagtgtttgtggagtgcagaatgagggtgtgtgcctcacacaagcttctgtttgtctgcattttaccaccacagtctgaatatttgtgcccaaggaaaaataattctagttgcttctacagagaaataacttttttttaaaaaaagggctgggcataatggctcatgcctgtggtcccagctacttaagaggctgaggcgggaggatcccttgagcccaggaggttgaggctaccatgagccgtgattgcaccactgcactctagcctgagtgacacagtgagatcctgtctctaataaaataaataggaaaaaattaggctaaatgtcacaatgagaaggagagatgctttggaaggaaaagggttgctgggagcagaaacacatttgggtctataaataaaattgggaaataagtgctaggtggcccagtgaagaaccagagaacatttgaaatgcatttcaattgctgtcatctcatttgctgtgatgccctactcccatccccagcctataagccccctcagtgacacctcatgttctattgcacctgcggggctttatttgcctgcaaatacagattcatctttggaggaggaagcatcacctctcatcttccctcacgggagaaatcccagggaggagtagtgctggggagaggggtctggagcctgcactcacatcctgcgctgcctgcttgtttccaggtctgcacccggggactgagtataagatcacggtggtgcccatgagaggagagctggagggcaagccgatcctcctgaatggcaggacaggtgagagctacttggaggcactatgggcatttaatcatgtttgcattctcatatttttcttggctgactcctctctggataagaattctgggatttgcagacagacggggtggctcacgcctgtaatcccagcactttgggaggccaaggcaggcggatcacctgatgtcgggagttcgagaccagcctgaccaacatggagaaaccctgtctctactaaaaatacaaaataagctgggcgtggtggcgcatgcctgtaatcccagctactcgggagactgaggcaagagaattgcttgagcccgggaggtggaggttgtggtgagccgagatcgtgccattgcactccagcctgggcaacaagagtgaaactccatctcaaaaaaaaaaaaaaaaaaaagagaattctgggatttacatgtagagagagtctatccctttatgtactgatgtctatttttgggcagggaaagggaagcaaacttttcctatttcaaatttttcttgccattgaaaatctctcccagggtcttggagtcaagggacaagactgtctgacaccgttctgcttattttaatagcttctatcaccgcgttgtttttaaggcatttattatctaggacataggcacatagctccttattccctaaagacaagtgatctataattttcttcttgccacacctgtgttttttcctgatgcccacattcagtagactcctctaaaatgtcaaaagatattaaaaaccctcacatgggagtagtggtatgttgtcatctgtgtattgagaaaatatataatgataaaaggttacaaatcagtcatatttgacaataagtttgtaatttattaatcagaacagaattggaaaacatggtaggcatacatacgagacatcctaggtaacttttagtttttaaaccatgcttgagcccatattgaattgtgaacttcctcattaactctgtgctcctgccttccccatgctggaaacctgtgatctagaacatagtgccattcggggagactaatccttggagctggtaaagaaggagtctttgagttttgagtcttcgttgaaaagttttttagttctttccaattcagtcctggaaatagctggttatggtggtgagaataagaggtgagatgttgtgagaattgaattcactatttcagctgcctaacagattgcttatctgcagtatgaaacagttatagttgggcatttataatggagaacatataacttaatttacaaactagacaaggtagactgtacagtctgcctgaatagtggactagggaactgttttaacgggttagaaaatggtaagtacttctgtgcttccagtggcattccctgtagctgtgaattaattgagagcttactgagtgccaggcattataatcactaagcactttttatgaatatctcatttagttctcacagcaatccaatgaagtagatactattattatttctctgccacatataagaaaactggagaagttaagctcaagattgcccacccaggaaaggacagagctgggatttgaacccaggatacccaagtctaaacctttgggcttagctactgcaaaccaaaaagtatctgagataggccttaatcaacttagaagtttatttttccaaggttaaggacatgcctgggagaaagaaacatggaatcacagaaacaatctgtggtctgtacatttctccaaagatgattttgaggacttcaatatttaaatgggaaaagtgggctgaagaggaaatagggagggtataattcccatgttggaagagaaaggagcaggtagcgggatagtcaattacgtgttgagtacatttgcacttttctcaggataaggtgaacatggagtagctacctgtggagatatttaaccttttatccggcgtaggaacaaaaggaaaggcagcttcttgcataactcagctttcagctttattttttccttttggcagagtgaattggggtcccgagttttttattttcatttcaaactacaaagctaaagtgcttcccacttttaccttcctgtaagagataaacactttttcttctcttacacagtcaacacaacacagaacatttcacctctggaagtgatttttccccatacaccagggagttttccatcggacacaaactggatgttctataattcaattcatatctgacattgtctccctggaaatagcctcagatcccacaagttaaaggcccagtcccacaagactttcctcacttcagatgcctgtcacagtccccgggttaggacctgtacttctgaccaatcagctagaaattgggggttcttatgactcccctccttgagttccattaatttgctagagcagctcacagaacgcagggaaacactttacttacgtttacctatttagtataataaagaatattacaaagatccaggtgaagaaccagatggaagagatgcataggtcaaggtacgtgcttccatggcctctgtgggtgtgccaccctccccaaacctccacttgttcagcaaccaggaagcactctgaacccagtccttttgggttctcatggagacctcattatataggaatgattgattacatcattggccactggtgattaactcaacctttagcaactgtgagcgcctctctccttccccttgttaggggggtgggtaggtggggctggtagttccaatcctctaatcacaatgttggttccctggaaaccaccccctttctgaggctacccaggagcacccctcaaccccttacagcagtcatctcattaacatacagaagacacctcactttggagattccaagggttttaggagctgtgtgccaggaatcagggacccaaaaccaaacatgtgtttcttgttataaatcataacatcacacctcccctccttcttgcccattatttctggttaattttcatactgtttgcttcctaactgaaaaattttctatgattcctcactgactgaggaggaagcataatgcttttatcttggcctccgtggcccacccagcctgggccactgttattctcattacttccccagggaaagccttcctgtagccagactgtttgtggggtttcctaacagaaagcttatctctgcaagtgggtttctgttgttacttagcctggaaaacccttgccattatttctagccacaaattaatttaattcaacaaacatttattgcaggatgtatctgggccaaagagacctggtccctttagaaatttccagagctgataagccatggtccttttccttcaggggatcacagcaataatgtgacgtatccttccaggctgtgctcaaacagtttctccactgcagccttctatgaccgcattaaatgtcagccagatttgtttctgaggtctgagagcatttaatcacatatggccttgaattgctagttagccttccacctatactggaatgttgttactcaaaagtgtttttattgtcaattatatcctaaaaccaggatagaatattttattggattgcaaataaatttgtgtcatgtgttttaccagcatcaaaaagaaaaagacactgtaatttatagggtcaggaaacactcttaaacctggctagactgttaattaatttaagggaaaagaagaatctctgttttctccaaacgttttgcatcccaccaggtggaaaaggatgctggaacttaagaacagcctaagcatgtgcaggaggaaacgaggaaatgacaccgttcagggatttttcatgtaacgaggcacccagtgtaactaacaccatgacagggaaatggttgactgaaattcctcaccctgttacccaacatgctcaaagtgcgctggaacaccttccagaaaggccagcctcagaagcaggtcagcttaaggagcagcaagcatacgccaggccagtgtctctgggggattggcgaggggaatgtccctggacttctgcatcataccctgacagctatgcttcccattcaatgaaaagaaagggaggctactaactgagaggtgatgtcattcttttgtcctctatctataaaatgaagagttggactaaatgagtttaaagtcctttctcttttcttatgatgatggtattctgttaatagcttcatgcttttccctggtgtgtataaaacaaagcatgcttgctttgttataatttcacaagctcccatgcacagcaaaggttatagcctagaatattcacttgtcatcaattttctcagaactttcctccttagactatgctgtgaaatagcagttttgcttttcttaatatctttttcactttttactgatttccaaacacaatgttccatttgaaatggcttagcccctaaaactttggaaactccttcatgtcctaggctgagctcctgtcaccattgagaactcctgtctcatacacagccaccaacacacacatttagcatctggacaacagcaacaatctctatcatttgcgcgatcactgtattctagtgggcttctgtatattgtgagactttgtaaatattatctctggtccttataatatcaataggattgtaagcattattatttccattttacatatgagaacactgaggcctacaaagtttaggagactcagggtgagctagtgaacagctagctggtacaacttaggttcgcttgaaatcaaagtcaataacctttttagaagcaaagctggaggacaacaggaagaagggctgacctctctgagtgcattttctacaaacgatgccttttggataattttgttgccacaattgaaagacattagaggaggtctgtgaaaacaagagtacagaacgtgtaggtattgtggtctcaaggcacctcttccaggaacccaccttcaaatcaatgacacaggtcctgccccccgtgtcttcctcccccaagatcatttctcatagatttttcatcccgtcagtgccatcttctactgcaccaactgggagattcacaggtggaaattgtgagtggagaaacctgttcctaatgcctgtgactatgtgctcaagtgtggacaggagctttcggatgttacagcctagtgtgaagacagatgttccctacccaactctgtggcaaatcttgttataaagtggaataagctttcctgatgtgaacagagcttctaattaacctcctccatatactgtgttcaggttttgcaaattagatctctttgaagtgaagtgcacctttattctaactaacgtatgtactcacaggcgagtcccacctatccagttttacaaaccttactttacatctcattgaccttgaatgtccctaagaaaggtcccaccagggctgctagtgtccagcagttgggaagttccagcctggggaggatgttggggccagggtggggagagcctgtcttgtagtagaggctacagctgtggctaatctgtgatttagccagctgctgcagctgccgaaaggcttccttgcatggaaaaactatttcataatctccagatccctttttggtagaaagaggtttcagtcctgcaaagctggcctcttccagcaatgtggcctatcatggaggtcccatctctgaggccttcctcccattcctgtgtctcagcacctgatccccatcgggggaatggtcaaggagagcaagctctgtgaagagccccttctgagttgagttgctgtggttagagaactgagagaaaagggaaggcagggggccaagagctgtgactggcactgtgagcttggagaagtcacatctcctctcttaaacttctttaaacctccaggtctcctataaccctggtcataatatgattcagttttaccttcctactcttcatacccaagatgctgtttcctggttcttctccatcccttgagtgctctgggactggtgggagagaaaggagctacagagctggctgctgcttcctctttccacccatgtggacatgatggatctttcctttatttatttacttttatttatttattatttttatttatttatttatttatttatttatttatttatttattttgagactgagtcttgctatgtcacctaggctggagtgtggtgcatgatctcggcttactgcaacctctgccttccaagttcaagccattctcgtgcctcagcctcccgagtagctgggattacaggcatgtaccaccctgcccggctaattttttgtgtttttagtagagacagggttttgccatgttggccaggctagtctcgaactcctggcctcaagtgatccacccagcttcacctcccaaagtgctggaattacaggtatgagctgttgtgcctggctatgatatatttttcaatacacacaggcagcaccaaccccacaaagccacaggcctctgctgtgggtcctggaagcaatggtagcaagcaccaatctggggcagggagatggggtgggaggcactgctgggacctggggttgtacagatgtggatgcttttgagaaggtgagggccatgaacttcacgagcaggactgctagggtgttcttgctcgcttcttcctgcctccttagttttccatttccactttgtcactaatttccccagattgagatattggttttggatggctcttgtcatctcttccctatgacatgcaggatcatgtcttgcacagaaagttgtaacaggatggggagagagttctctctatcgttgcactcttttccttgactgtcctcttacagcctgctggagcctccagaggccctggccatggggtcagacagtgggtgcctgcatcctaattgtccactctgtcattcctggaggcccacaagtggctattgtgagactattggctctgagctcacagtgccagtcacagtgagactattgtctcacaaggcaatagttcaagaacgagtttctctctctagttactgtctattactgctgctggatttcatgtcacagtaacctttcagttcacactttactttatttataatttattattattattagttgcaaaggaaaatgctattgatagtgctgcttaggacatagacatataaagtggaaatgtatagtctttgttagataagaatgagttcaaatcttggctctaccacttaatgtatccaaaagcaaacgcttggtcctcttcctctccccactccctactgcaaatgcttccctccctcagatatccctgtctctataaatggccactccattttgcaaattacttgggccacaagccaacaaatcattcattgtatcccatgttgaatccatcagcagattatgacagccttacctttgaaagctccaaagccagccttccccatgaccctcattactgctgcagtggcctgcacccccaccatcttgcatatacaccactgaagcagcctcctgggtgaccttcactcttggttcactagagtgagtattctcctcagaagccagagggatcctttgatagcccaagtcagatcaggtcattcttcttttcaaagcccccagagacttctcttgttacttagtgtaaaagacaatgtcattacaatggccttcaaggccatccatagtccactgtccctctcacttccctggcctcccctccagccgcttgacttaactctgtctagatgcactggcctccttgctgttgcttgaacacatgaagcaggaccttgggttagcagggacatgtgtcaaagaaaaaatgagagattttctaaggtcatgggctcaggatatgttcttgggaagcacagtctctaggacacagctggcatattgttctgggttatttctttttgaatataagctccacattggtggggatttctgactgttttgctcattggtaactcttaaatgtcattacattccctgacacataatggatgttcagtgaagtgctgttgaatgaatgaagtgagttttggagatttgtatttgaaaagagagagaggagcatgtgtagataaaagtgccaggtctggaaactgtgatttggaagcaatgaacaggggaggtgatgttgttttgatttgaggagaactagggaggggaatgatgactcttcttgaatacttgctggttggtcttctggaaggggaattagatgtattctctctgtctacctagggtagacaattagaaggagttacatttgaaggagttttctctaatatgttcagtagtctgcaaatggaaaatggaatggattgtgttgtctattggagagtcctttcttagtttagggttcaagcagaagccagttgtccacttgtcactgatgatggagagacccccttgtattgcataaactattgaactaggtcacccaggtgaactagatctttaacaatctatgatcttgactaaccaactggtttctctgatttttctttctcatgtgtttttatgaagaaattgacagtccaaccaatgttgtcactgatcgagtgactgaagacacagcaactgtctcctgggacccagtgcaggctgtcatagacaagtatgtagtgcgctacacttctgctgatggggacaccaaggaaatggcagtgcacaaggatgagagcagcactgtcctgacgggcctgaagccaggagaggcatacaaggtctacgtgtgggctgaaaggggcaaccaggggagcaagaaagctgacaccaatgccctcacaggtaacagaaggacgggagcataaataggtttcctcatggcagggagaaggttgatttttgaatcaggaggtcattgctcacctggcatcagctcttttgtttgcaggagtggggaggaggttgcaaaaccaattttgattttcataattatatatatttttcctttttaacatcaaacaaaagagatcagctttttcacttgatgcagaaggtcatacttatttgagttggaattccgtatgcaaccccctcagaatagagtaacacttcctaattttcattttttagatgtgaaaactcaaaacattgggctgacagtgaatttgaatgcttatctcagtttgcagtggctgtgcaggcactttgcatataatctggagctctcttttagaccgtggaaatagtttgcatcctaagtcaacatttactaaatggaccaattcttcctttaagctttcagaagccatgagggttctcatacttcacccagtcattctgctcagtttgcgcctgcaggggtcctgggactatactgggacatagcccagccattctttctgcttaaatcctctcctggtgcttctctgaatttagagcagcctgatcctggtgcccgcatgaggttccaaaacacctggcaggaaatcagagggaaaggcttcgcttattgtttgcattctattctggacagttactgagtatagagactctcagagaagcagagagatggttaggaatatggtttcagaaaattgactgtccaggttttaaccccagctctgccattgactagctgagtggctttgagcaagttactttacttccgttcctgtttcttatggcacaagtgagagcaatgattttttagaatgttaatcagtatttggctcttgaaagatttcgtggtgcacagcctcctagatccatgtgggcctcaatagttgacctcttcttcaggggagcagagaagatattgacagtaaggatggtgatatctaaatctgtttaaagtcaaagtcagcaaatttctgtaaaggaccagatagtaaatatttttggctttgggggtccaacagtttctattgcaattacttaactctgccattggagcatgaaaacagccacagacaatgatgtgtaaatggactggtgtgactgtgttccgataagactttattgataaagattgacagtggatcagatttggcctgtgggttgtagattgcccctcctggtttacattacacgtgactctctgtttactaggattttgagtgtcgtgaaaagaaagagcatttgggtcagcatttttgtttgtttgtttgttttgttttgtttgagacagagtctcgctctcttgcccaggctggagtgcaatggcgcaatctgggctcactgcaacctccatctcccgggttcaagcgattctcctgcctcagcctcccaagtagctgggatttcaggcacccgccaccacgcccagctaatttttgtatttttaatagagacgggttttcactgtgttccccaggctggtctcgaactcctgagctcaagcaatccaccctcctcggcctcccaaagtgctgggaaatacaggcgtgagccaccacgcccggcccatttttaaaacaaaggaagttggaatagagaagaaccttcccttttcttaggcggtggtggtgtgagcagcagggagcctctggagggtggcattgccactgggaaggggtcagaccagagctgagctctgggggcacaaacatgaaggaagtgattcacgcctgtatggcattcacaatcctctgggtagagaagacaagttaaaaagataaaggacagtgagttatgttctagagcaaacaaatgtccctggagctatgggaaactgaagaaaggggacctaccacagactaggacaggataggggtcatgcaggctgtgggaggaggtgacacctgaacaaagcctggaaggacgggtgggagttagcagtggaggcagcatatgcagaggctaagttgtgagaatatgacaggttaggtcatctcaaggggttttaatggagggccggtctgtgtgtttggtgcactagtgaaggataagccagctcagaatcctgggtgctaaatcatttgtcctcatgtcagatgtctgtggtgcatgctgaactttgctccctagggtgagtcactgcatgtggctgtgcattccaccatgctggcctgtcccccttggcaagtggtcctgtgcaggtatgaaatgcaggtgctgtcacaaaaagtacagccttttttgaggaggtagtttctaaaagaggataataaagtcatgctaaccatacacacaattgcttggatttttgactccctaaggatgtacattttgaggagaaagtggtatttcatgcctcaaatgccattaataataacaacttatatttaagcatttgctatgcaatatctcatttactatcaccataacctatgaggtaggtagtggtatttctttcttcatagagttgaggagacagacacttaaattacacggcttgtccaaagttagccaccaggaagagatggagcccaggttctaacccactttaatcacagagaaacccagacagattctacaagtttgattctttttattagaccagacctcagatactatcaattaaaaagtctcctggttccctggccacagatgtaatgttttatatggaaagaactgatggctactacttctaggatatttttcttctcaaagaacatattagagcagatgcagaggtttattcagtataattgctttctagtacaaggagtcaggaactagaagaatatgttatataaatccagggtaaaggagaaatttgaatgtgaagaccaattatttttatcccaaagcgacttccgggaaaagtttatagagttgataaagatgctggctttgtctgaaaactccacttcttattaaatgttattagcttattactggaatttcagaccatttgcttaattagacctttacattaactcaatcattgacatattagagactctgacatttgttgaggttatcactttgactgtgttcgtgctgtctttatggaattagagggtggtaaaggctacattcttctttcatctctctcttaaagaaattgacagcccagcaaacctggtgactgaccgggtgactgagaataccgccaccatctcctgggacccggtacaggccaccattgacaagtacgtggtgcgctacacctctgctgacgaccaagagaccagagaggttctggtggggaaggagcagagcagcactgtcctgacaggcctgaggccaggtgtggagtacacagtgcatgtctgggcccagaagggggaccgagagagcaagaaggctgacaccaacgccccgacaggtaacaaaagagagatggtcaattggaattgagttttagcttgtggatttgaataggtatggtatcaaaggatgtggcctgagcagaaagactttgcaattagaagtcttaaagatgaaagaaagactgagctctcgtggtgatggcggtgggctgctctttcctgacagtgatgagctgttcatgagaccacttggcccactgaaagagagaagtaaagtcttatagtaacaatgcttttagcagaagatgggtacaggatctggtcattgcagtgcttgtgataatatttttagagtgctcatcagtgaagtagcccttgataaaatgttatgttaggaaccctaaatgtcatggcagctgtttaattggaggttgtgatgtgccatatgctgctgagaagacatcgttcctccaacattttagggaactgaaagccaagaaagaatgcctcatttataatgattcctcctttgaagttcagaaccaagggctactttctccttagactcccagcggagactcaggatgagaatgccattgccttgttctaaaagagctctggaagatgaaaatgatgaagatgggggtaaggatatgtcttccatggcttcagagcttaaacctttccaaacattttccttccagatattgacagccccaaaaacctggtgactgaccgggtgacagagaatatggccacggtctcctgggacccggtgcaggccgccattgacaagtacgtggtgcgctacacctctgctggtggagagaccagggaggttccggtggggaaggagcagagcagcacagtcctgacaggcctgagaccgggtatggagtacatggtgcacgtgtgggcccagaagggggaccaggagagcaagaaggccgacaccaaggcccagacaggtaaggagtgtgcattattgctgtgccgatgccatgctcagggtctgtctacatggggttttcttctctgaccttggcataaagggggactttatggaagagcaggttggtatcctcccataatacattgtgtccccctcacttccttttactggcctctcttagaatgcctaagtggtggtctccaaactctggtctttaaagatggctgatcactgcacatagttctttgttctttctttgcctgagtacctttgtcattaacacactaactgcttctccttgacaaggagtaaatattaagaagtaactatcatgctgagggagccagacttagggattgtgatcaatcccttaaaaaaaattcctcacctgtttaaaccctttgcaagcttgtttgtttttgttcctgccatctgaatgaatgttttaggcagaaataataacagtgtttccattagctaaaaataaaatatctagtcatttttagtcccccagatgtaattatgtctattttcatgtaatagtccctacttccctacatgaaatcttctcctctctctcgacttgggccacctgtgggccagctgcctgctccaggcaggggacatgcacaatttctcttgtattttctgctgtgtacctcaagcactgctcttctagcttgctgtatgcagtttctcacccatttatctttggcgttgctgggagaggtaaactgatgagaggtgaggggtgaggacgggcagaagtgaagggtcaggaaggaggagaggtgaagggtcaaggggaaggagaggtgaggggtcaggaggagaagaggtaaggggtcagaggaggagaagtgaggggtcagtaaggaggaaaggtgaggggtcaggaagaggagagatgaggcatcaggaggaggacaagtgaggggttgggaagaggagaggtgaggcgtcagtaagaggagaggtaagggtcctggaagaggagagatgagggctcaggaggaggagaggtgaggggtcaggaggaggagaggtgaggggtcaggaggaggagaggtgaggggtcaggaggaagcgaagtgaagggtcaagagagaatagagcccaggggttagggaggagggagctgggggtcgtggaaagtcatgcttgactgtaacaggtgtttgggcctgccctggagcctgacgagtgctaaagctgactcggtcatgaagcacttctgtgctcctcttctacttgggtctctcactgtaggcaaatgcctgtcttccactggtctcttactccccttcctctgccaatacatcaggggttcccccagcgcctctctggtggggttgccttgcccctctaggtggtcctcttggacagcttcccaggcctaccttgctgtgctaggcccaagtctggtccatggagaacctgcatgcatcctttgtccattcaaccagatgcacagctcttttgcaatgctacagcctgtctttgctctgtgtcagagcaaccagctattttcttatctcttagatattttagcatatgtcagacaccagcccgtatgattccccaagctttgggctttctcacccttggcactattgctatcttggggtggataattctttgctgcagaggtctatcttgtgcattgtaagatgtttagcagcatccctgatgtctccccctatcccacactgagttgtgacaaccaaaagtgtctccagacattgctgactgcccctggttgagaactgctgctctagggtatgcaaaacaaagtctgtaagggattccattgaaaactgcttattcaaggcttgggcctcacccatgggactcacagtgtatctttttccaaataaatcccttcttcaagtcccacctcactggcttctccaatgtcttttatagggcgaaaatgattggtcagccaagggtcacaaaactgttgttgatcttgccttgactgtggttcctcaggttggaatgtagatatccattttcttggggttacagcctaaagcaacatgtgtaataggacgtatgagcaagtgactttgggaaaacggcttttgcaatgaattatttaggacaaagaaatgctagtttttttttttggtgaatgtatttttaagtatcttctatgtatgtggtatggaggaacataatttcttgtatttataatgtatcaacaaactggtgttaataatgatagcttatggtcattgggcatctactcagtgctaagaactcataatagacatttgtttcttttttaaaaaaattgatacataataatatacatatttataggtacatgtgatgttctaatacatgcatgcaatgtgtgatgatcaaatcagggtaatcaggatatccatcagctcaacatttggcatttctttgagttagaaacatgtcaaatcttctcttctagctattttgaaatgtacaataaatcattgttaactgtagtcatcctgtgtccggaattggtgggttcttggtctcactgacttcaagaatgaagctgcggaccctcgcggtgagtgttacagctcttaaggtggcgcatctggagtctgtcccttgtgatgttcagatgtgttcggagtttcttccttctggtgggttcgtggtctctggtctcgctggatcaggagtgaagctgcagaccttcgcggtgagtgttacagctcttaaggcagcgcgtctggagttgttggttcctcccggtgggctcgtggtctcgctgggctcaggagtgaagctgcagatcttcgcggtgttacagctcataaaagcagcgtggacccaaagagtgagcagtagcaagatttattgcaaagagcgaaagaacaaagcttccacagtgtggaaggggacccgagaaggttgccaatgctggctcgggcagcctgcttttattgtcttttctggccccacccacatcctgctgattggtagagccgagtggcctgttttgtcagggcgctgattggtgcgtttacaatccctgagctagatacaaaggttctccacgtccccatcagattagttagatacagagtttctacacacaggttctccagggccccaccagagcagctagatacagagtgtcgattggtgcactcacaaaccttgagctaaacacagggtgctgattggggtatttacaatccctgagctagacataaaggttcaccaaggccccaccagagcagctagatacacagtgtcgattggtgcactcacaaaccttgagctaaacagagggtgctgattggtgtatttacaaaccttgagctagatacagagtgccgattggtgtatttacaatccttgagctagacataaaggtcctccacgtcctcaccagagcagctagatacagagtgttgattggtgcactcacaaaccttgagctaaacacagggtgctggttggggtatttacaatccctgagctagacataaaagttctccaaggccccaccagagcagctagatacagagtgttgattggtgcactcacaaaccttgagctagacacagggtgctgattggtgtgtttacaatccctgagctagatannnnnnnnnnnnnnnnnnnngggttgatccaggggtcctcggtagaagttgttagttgaactcttttggggttccatttgtaagaccatctgtagcttgatggcctcgattctagaggaaacaaatttgacaagaaggttaaaaatacagggcccaaaggcgagtaacagcaagatggctgccacaggacctagaaaggggagaagccatgttgcctaactccagaagttggtataagaatttgaaaggcgttgtctgatttcagaagccttttcctgtaaactccgggcagcatctcatactatccccgactggttagtgtaaaaacaacattcttcccctaagaaggtgtagtgtcctcctttttcagcagtgaggaggtctaggcctctgcagttttggagagtcactgctgccaaagagtctatttgggattgtaaagtaaggatagatttcattatttcttgcaaactgtctgagaggcagatatgggttgaagatccacataagtagaatatgccttggctgggtagatagaaatttaccctggcttttaaaggaatgggatatgctgtttttttctttactacttctatctctctctttctctcttcgacttcttctttgtcttttcctttcttcttaactttttttttgactttctgtgtctgtccctctttctgactccttttttttgtctctgtttctgactacctctttgactttctgtctctttgtctcttcctctctctgtctctttctctgactttctctttctctcttttcttcttgctggtctttccctacctctgccagccgcttatgctgctgttctcctctctccttcccattttgatggctttgtcagtgtaagattcctacctctttgtgtttttttgcattacgtgactgtgcgggcatttttttgcccttctaaattgtccttccaatgcccagacttcagtgttgattccctcctcaagtaggggacaacaaatgggtaacttgttccccatatttatgtagataatagctccagccttggctaatatatccctccctaataagggtgtgggactttcagacataacaagaaagccatgtgaaaagagcaaagtctcccaattacaactgaggaggtgggagaaatacctgattacaggctgtcccaggattcctcggatggtaacagaccttgaggacagttgtctaggacaggagattaacactgagaaggccgcgccagtatccaggaggaagtcaatttcctggccctcaatagttaaacatacccagggctcagtgagggtgatgacatgagctggtgcttgccccgggcaccctcagtcctgttgttggatcatctggttgggggcttctaacccagggaaccttcatcctctggggcagtgcaccttccagtgattgcctcggcatagtggacacggatgagggggcagcttgtttcttattggacaatcttttttaaagtgtcctagtaaaccgcactgataacaagccgtaccaggtgattggcctgctccattttctgacctctctgaaccaccaaggtttgtttgtctgagggccatgactaaggctgcggcctttctctgatctcgcttttccttttgggcctgttcctcttggtccctattatagaacaccaaggttgccaggtttaataatgtctctagattttgttcagggctcagggcttgcttttggagctttctcctgatatctgtggctgattgggtaataaacttatcttttagaatcaattgaccctcgagtgattcgggtgacaggggagtatattttcttaaggcctcttgtagccgctcgaggaaggcagaaggattttcttcctttccctgggttatggtggatatcattgaataattcatgggctttttcccaattctccttagtccttccagaacacagatcaacagatgtttacgactccagtccccatgatctgagtcaaagtcccagtggggatccatactggggatggcttgctgaccagtagggaagttgtccctttcttcggctgtcattctttcatttacttgactaggataccaggtatctccaaactctcaggctgcagctaaagccgcattcttttcattaaaggccagggtttgatctaacagtagcatgacgtctctccaagtgaggtcaaaggtttgccctagaccctgtaggacatctatgtacctatcaggatcatctgaaaacttccccaggtctgccttgatctgctttaaatcagagagggagaaggggacatgcacccgggttgggccaaattcccctccccctacagcttgaaggggacataaccgatagcccgggggtttttgtggacctttggagatttctttgcttatttccttctgggcaggggagattagaggaggagtatcatcaataggaagggaagctatagggaggctaggatatgggggtaagctgaggggtcctcctgtgggatgtaaattgcaagctttgcatagttgtgtattctccctcaatgaaaagaaagcttggacataaggtatttcactccatttgccttccctcttacagaaaagatcaagctgcaggatagtattgtaatttgtgcttccctcaggtggccatttttccccatcagaaagagaatattggggccaagccgtagtgcaggaaaaaatgagcctcctctttttcagggtttgtgggtcaaattggtcccaatggcttaggatgcatttcaagggtgaacctgttgatgcctgagtgtttcccatatgaaagacaaaaccgcccacagttttggtttgttttgtttctctccctgcccaaggacctgcaatggtcctgggaccctgctgatcagaatagttgcattcaccaatgcagcagcagaaacaacccctgcccaagaacctgcaacggtccctggaccctgctgacttgaatagttgcgctcaccgacgcagcagcagaaacactagttttcctcccagaccacatggaggaccgaggaaggtcggatttagtggtccttactgacgcattctcgaaaacctgcacccttgcctgtcctcctagaccacaaggaggaccgactgagaaaaatcagatttagtggcccttactgacgcattctcaaaaacctgttagagtcctaagcattctcctgttagtattgggactttaccccatcctataaagatgttatgccacaaaaatgaaatggagggccataccctgagggagggaggggatcttcagggttggaagagtgacaccttttgttctcacttatatgaataggaaggatacaatttctgaggctccccatatcctagcttcaggaataacttttgttaggcctgttagtctgaggagggatcctaaaattccaggtagtccccactacgatggggccttgggcaaaaactgtgtctttctgattggtgagcccgggtgcctaaagaaggtaacagagtcctggagtttatactagaaatcattcttataggagaaactagaaaagcaccagagacaggtagcaatttttagaagcgggtctagcctcagagaagagaggcgagaggaagtttgtctggcaggcattaggacccagagggcaagggtcaggatagataggatagataggcgagtgtcgcttgggcgacatgcttttgagagttccactcatggccgcagggtcaaccaacatgttgtcgggaccccggagatgcatggctttcctcactgtcaacccacggctcagcccagaagtacaggaaaagcggaagctggttctaggcaaaccaacggtcccaactccaaagagttgggggttgttagagagccctttcccagaaagcttgacacccgtgtctttagtccggcggcccgctagtcacttttaaatggctgacagatgcccggtatttagcccccgaattctaaagaaagataggacagaatagcaagtgaaaggggtccgatggtactcactgcttggcgattgggaaaggtctcaccgctcggctattgtctcaccgcttggcgatatgcgaaagtcccttcgtggtcgccaaaatgtgtccggaattggtgggttcttggtctcactgacttcaaggatgaagccgcaaaccctcgtggtgagtgttacagctcttaaggtggcgcatctggagtctgtcccttctgatgttcagatgtgtttggagtttcttccttctggtgggttcgtggtcttgctggctcaggagtgaagctgcagaccttcgtggtgagtgttacagctcttaaggtggcgcatctggagtctgtcccttctgatgttctgatgtgttcggagtttcttccttctggtgggttcgtggtctcgctggctcaggagtgaagctgcagaccttcgtggtgagtgttacagctcttaaggcagcacgtctggagttgttcgttcctcccagtgggctcatggtcttgctgggctcaggagtgaagctgcagatcttcgcggtgagtgttacagctcataaaagcagcgtggacccaaagagtgagcagtagcaagatttattgcaaagagcgaaagaacaaagcttccacagtgtggaaggggacccgagaaggttgccaatgctggctcgggcagcctgcttttattgtcttttctggccccacccacatcctgctgattggtagagccgagtggcctgttttgtcagggcgctgattggtgcgtttacaatccctgagctagatacaaaggttctccacgtccccatcagattagttagatacagagtttctacacacaggttctccagggccccaccagagcagctagatacagagtgtcgattggtgcactcacaaaccttgagctaaacacagggtgctgattgtggtatttacaatccctgagctagacataaaggttcaccaaggccccaccagagcagctagatacacagtgtcgattggtgcactcacaaaccttgagctaaacagagggtgctgattggtgtatttacaaaccttgagctagatacagagtgccgattggtgtatttacaatccttgagctagacataaaggtcctccacgtcctcatcagagcagctagatacagagtgtcgattggtgcactcacaaaccttgagctaaacacagggtgctggttggggtatttacaatccctgagctagacataaaagttctccaaggccccaccagagcagctagatacagagtgttgattggtgcactcacaaaccttgagctagacacagggtgctgattggtgtgtttacaatccctgagctagatataaagactctccacgtccccaccagactcaggagcccagctggcttcacccagtggatcccgcactggggctgcaggtggagctgtctgccagtcccgcgccatgaacttgtactcctcagcccttgggtagtcgacgggactgggtgccatggagcaggggatggtattcgtcggggaggctcgggctgcacaggaacccacagaggttggggaaggcttaggcatggcgggctgcaggtcccgagtcctgcccggcgggaaggcagctaaggctcggcgagaaatcgagcgcagtgccggtgggctggcactgctgggggacccagtacaccctccgcagctgctggcccgggtgctaagcccctcactgcccggggccagcagggctggccggctgctctgagtgcggggccctccaagcccatgcccacctagaactccagctggcccgcaagcaccatgcgcagccctggttcccactcgcgcctctccctccacacctccccgcaagctgagggagtgggctccagccttggccagcccagaaaggggctcccacagtgtagtggtggactgaagggctcctcaaatgctgccaaagtgggagcccaggcagaggaggtgccaagagcaagtgagggctctgaggactgccagcatgctgtcacctctcaatccccctctaaacaggacaccccaactgctgttggcaatttggccgatgaccactctagctacttcctgctggatggggcaaagaaggggccctgcagttgcggtgtccttcagaggggaactctctaggccaggggaagtgccagtnnnnnnnnnnnnnnnnnnnntgattggtagagccgagtggcctgttttgtcagggcgctgattggtgcgtttacaatcccctgagctagatacaaaggttctccacgtccccatcagattagttagatacagagtttctacacacaggttctccagggccccaccagagcagctagatacagagtgtcgattggtgcactcacaaaccttgagctaaacacagggtgctgattggggtatttacaatccctgagctagacataaaggttcaccaaggccccgccagagcagctagatacacagtgtcgattggtgcactcacaaaccttgagctaaacagagggtgctgattggtgtatttacaaaccttgagctagatacagagtgccgattggtgtatttacaatccttgagctagacataaaggttctccacatcctcaccagagcagctagatacggagtgttgattggtgcactcacaaaccttgagctaaacacagggtgctggttggggtatttacaatccctgagctagacataaaggttctccaaggccccaccagagcagctagatacagagtgttgattggtgcactcacaaaccttgagctagacacagggtgctgattggtgtgtttacaatctctgagctagatataaagactctccacgtccccaccagaccaggagcccagctggcttcaccgagtggatcccgcactggggctgcaggtggagctgcctgccagtcccatgccatgagctcgtactcgtcagcccttgggtggtcgatgggactgggcgccgtggagcaggggatggtattcgttggggaggctcgggctgcacaggaacccacggaggcaggggaaggcttaggcatggcgggctgcaggtctcgagccctgccccgtgggaaggcagctaaggctcagcgagaaatcgagcgtagcgccggtgggctggcactgctgggggacccagtacaccctccgcagctgctggcccgggtgctaagcccctcactgcccggggccagcagggctggccggctgctctgagtgcggggccctccaagcccatgcccacctagaactccagctggcccgcaagcaccatgtgcagccctggttcccgctcacgcctctccctccacacctccccgcaagctgagggagtgggctccagccttggccagcccagaaaggggctcccacagtgtagtggtgggctgaagggctcctcaaatgctgccaaagtgggagcccaggcagaggaggtgccaagagcaagtgagggctctgaggactgccagcacgctgtcacctcttaatcctactgtgctatcaaacactagaatgtatttcttctatctaactgtatttttttttttttttttttttttttttgagacggagtctcgctctgtcgcccaggccggactgcggactgcagtggcgcaatctcggctcactgcaagctccgcttcccgggttcacgccattctcctgcctcagcctcccgagtagctgggactacaggcgcccgccaccgcgcccggctaattttttgtatttttagtagagacggggtttcaccttgttagccaggatggtctcgatctcctgacctcatgatgcacccgcctcggcctcccaaagtgctgggattacaggcgtgagccaccgggcccggcctatctaactgtatttttaaacccttaagccaacctgtgttcattccccttactcctacacttcctagcctctggcaaccatcattttattcgcaacttccaggagatcaatttttttagctcccacatatgagtaagaacatgcaatgtttgtgtttctgtgcctggcttatttcacttaacataataacctccagtttgatctgtgttgctgcaaaggaaaggattttattcctttttatggctgaatggtattctgttgtgtatgtatatgtgtatatatatattatatatatatatacacatacatatgtattatatatatacacacatacatatatatatatcaaaatttccttatccatccactagtggacagttaggttaattcagtattttggttattatgaatagtgctgcagtaaacatgggcatgcagctatctctttgatatactgatttccttttttttggatgtatactcagcagtgaggttgctggatcatatggtacatctatttttagttttttgaggaaactccatgcttttactcatagtggctgtactaattgccattcccaccagcagtgaactagtattcccctttctccacatcctcaccagtacctgttattgtttgtctttttgataatagcagttttaacagggatgagatgatatctcaatgtgattttgatttgcatttccctgatgattagtgatgttgaacattttttcgtaaatgtttgttggtcatttgtatgtcttcttttgagaaatgtctatttagatcatttgcccattttaaaataagatgatgatgatgattgttattattattttgctattgagtttgaactccttatgtattctgtttattaatactttatcacatagacagcttgcaaatagtttctcccattatgtaggttgtctctgcattctgtcgattatttcctttgctgtgcaaaagcttttcagcttgatgtatttccatttgtctatttttgcttttgttgcctgtgcttttgcagtcttacccaaaatatctgcctagaccaatgttctaaagtgtttcaccaatgttttcttctgtagtttcatagtttcaggtcttacatttaattctttaatccactttaatttaatttttgaatacggtgagaaatagaggtctagttttattcttctgcatatggatattcaattttcctagaactatttattgatgagcctgttctttccccattgaatgttcttggttacttgtcaaaaatcagttggcagtaaatatgtggatttatttctgggttctctattctgttccattgtgcctatgtgtccgtttttatgccaggtccaagctgttttggttactgtagctttgtagtacatattagagtcagctcatgtgatgcctccagctttgttatttttgctcaggatttctttggctatttggggtcttctgtggttccatatgaattttagaatttttttttctaggctgggtgcagtggctcatgcctgtaatcccagcactttgggaggtcaaggcgggtggatcatttgaggtcaggagttcaagaccagcctggccaacatggtgaaaccctgtttctactaaaaatacaagaaaaaaaaaaagggctgggtgcggtagctcacgcctgtaatcccagtactttgggaggccaaggcaggtggatcacctgaggacagaagttcgagaccagcctggccaacacggtgaaactccgtctctactataaatacaaaaattagctgaatgtggtggcaggtgcctgtaatcccagttacttgggaggctgaggcaggagaatcgcttgaacctgggaggcagaggttgcagtgagccaagatcacaccattgcactccagcctgggcaacaagagtgaaactccgtctcaaaacaaaagcaaaaataattagctgggcatgatggtgcacgcctgtaatcccagctactggggaggctgaggcaggagaatcacttgaacccaggagatggaggtcgcagtgagctgagatcatgccactgcactccagcctgggaaacagagcgagactctgtctcaaaaaaaaaaaaaaaaaaaaaaaaaaaaagaattgtttttctaaagaatgtcattgatattttgatacagattgcattgaatctatagattgcttttgggagtacaattttttttacaatattcttcccattcatagacataggatatatttccattttttggtgacatcttcaatttctttcatcagtgttttatggtttttccttgcagcgatctttcacctctttggttaaatttatttatgggtgtgtttttaaaagtagctattgtaaaagggattgcttccttgatttttttttttatgctagttcattgctggtatatagaaacactactgatttttatatgctaattttgtatcgtgaaactttattgaatttatcagctctaagagtgtcttggtggagcttgttagggttttctatatatgagatcatgttatctgcaaacagggacaatttggcttcctctttttcaatttggatgctctttattcctttctgttgcctaattgctctggctaggacttccagtactatgttgaataagagtggtaagagtggtcatccttgtcttgttctggttcttagagaaaagctttcagtttttccccaatcagtgtattgttaaatatgggtttgtcttatatggcctttagagtgttgaggtatgctttttttatatctagcttgtttagggtttttatcatgaaacgttgttgaatgttatcaaatgctttttgcatctattgagatgatatttttttttattcttcattgtgtttatgtgatgtgtcacatttattgatttgtgtatgttaactattcttgcatccctgtgataaatctcacttgtatcctcttgctgaattgatctctttttctttacataataacctcctttgcctctttttatacttttgacttaaaaaatctgtttaatctcatataagcatagctactcctgtttgcttttggtttctgtttacatggaatatctttttccatcctttcactttgcatctatatgtgtttccacaggtgaaggaagattcttgtaggtagcacataagtgggtcatttttttaaagatccattcagccggccgatcttttttttttttttttttttttttttttttttttttttgaggcaaagcctcactctgttgtccaggctggaatgcagtggtgtaatctcggctcactgcaacctctgcttctcaggttcaagtgattctcccacctcaaccctccaagtagctgggactataggcatgtgccaccatgtctggctaatttttttttgtatttttagtagagacagggtttcaccatgttggctaggctggtctcaaactcctgaccttcaagtgatctgcctgcctcgacctcccaaagtgctgggattacaggcatgagccctatgcccggcctcagcaagtctatcttttaagtggggaatttaatccatttacatccaaggttattattgataggagaggagtgactcctgtcatttgtaaattgttttctagattattttgtatatcctttgttaatttcttcttctattattgtttcttattgtgatttggtaggtttttgtagtactgaggcttgatccttttctttctcctttgtgtatctgctctgccagtgagtttatacttttctatgttctcatgattgtgattatcatctttttgcttccaaacgtaggactcccttgagcatttcttgtagagccagtttagtggtgatggattccctcagtttttccttttctgggaaagactttgtttctccctcatttctgaagaatagacttgctgggtgtggtattctcagttgacagctttttttccacccctttcagatcttgggctatatcatccctttctctcctggcctgtaagatttctgctgagaattttgctgtttgtctaatgggattcccttatatgtgacctaacacttttcttttactgtttttagaattttctctttgtctttgactattgacaacttgactataatatacttcaggaaggacctttttggggttgaatctatttagggacttgagcttcctagatctgaatattcatatctctccccagacttgggacattttcagctattatttcattaagtaggttttctatacctttttacatctcttttctttctggaactcctgtaatatgaatatttattcacttaatagtatcccttaggttttgtaggctttctttactctttttcatttttatttcttttctttctctcactgggtaatgtcaaacaatttatcttcaagttcagagatccttttttctgcttgatcaagtctgctgtggaagctcttcattatatttttaaattccattcattgaattcattagctgtgtttcttttttgtgatatctatctcttcactgaatttctcattcatatcatgtattatttttctgatttcatcaaatagtctatctgtattttttgaatttcattaagtttccttaagatcattattttgaattccttttctgacaatgtatcgatttctttttaattggggtctgtttctagagagttattatgttcctttggtggtgtcatgttttcttgctttcttcatgttccttgtgtccttgcattgaggtctgtgtatctggtggaacaattgcctcttctaaactttctagagtggctttcttagagaaatacttttacctcagttgaattttaatgtgccagttgggaagggtggttcacgtaggttcggtggtatagtctttgtgcagcttctttggctgtgtttgacatcagcaataactatgggcatatcagtggcctagactacagaagtttgtggtagtggtggtggcagtataggttgttaatgtccttggtagcaagggctattctattcttattttctccataatgggaagacttagctgaaagtctccctcttggggtcaggtctgacatggcatagaagcagttgccatgacactgggtttcaagtacaggtgctcaaagcaactgtggggcaaggtcttacttaggctcaaggtcttgtgaacctatagtggcacttgagtcttgggatgcagagtgatctctgtgtcagggctggatataggatgcctatagtgcctagcagcttggcttcagggggtcagtttgtaactgtaattctacccctgatgggcagggtgcagccgtggtttaacttggaggaagaagaagtgctctggaagtgtgagaccaggttgcaggatatggctgtaattgctgtaatttggaaacctgcaccaatagagctcagtggcaacttggatccctaggggtgaggaattgtgtagtggggattctaaactctacaatggtgggacttggcagtatcccagtctctgtaaggccagatgcagcagcagcaagcatcccaaaataatcaagcacactgttttttgggctgtaccagggcagggagcagcacaacaatgactctactccctgggagaagagtgtctcaggagctcagactcagggggcctagtccagctctagggaagaataatactagagttgtctggccagtagggtggggtgtcttagccaaccactgctgtatttccctgggacctagggtactatgtcagcacagccctaggacgtgcagctgctcagcttggttgaggcactgattccccagtgggcaatgtgccactccagctcagtcctgagggatgtgactatgctggatggcctcaacaccattttcctgggatatagggctctgccaaaagcattgttccctggggagcttccctgaggagctgaaactagtgcagtttcagctcaggcccctacgagtagagtgctgcctagtgtgacagaagtggatggagctgttttaccaaagtaatgattctccacgaaagagcgtgcagtttcagctctggaatgagtgggtaggggagggggatgtggagtcgttccactgctgcttggccccatggggaaaggtgtaacagttgctcacagctccgcttggagatgtcaggtcactgggtggtggtgtctcagcagcagtttacccttagggatgaaggggtgaatggctactcaccccgagagcaagacacattccaacagtagctccagttccaagacaccaagacggtgtagtacaatagccatgcaggccacagggggtggggcacagtgttggctccatttctgagggagcacagttgtgtacctgtaggcagctccctcagctgggcttagtgcctctgagagctgtaggagatcccagtggtgaggactgtaggtgtacaaggtgctgataggggctactgggatcttcttgcttacgttttgctgtagggagaagttcttcctggtttccagctgctcttacctgggcaatggggtggtggggtcccagtgtttccttctgttctctatgtggccatcctgagtttctgtgctcaccagagtttctgtttctcctttgacagaattctgcactctcctttagttattttttttttaaatgtcgttgtttattcttttagttgtttttgtgcagaagatgagtgtcagggatttctaactggccatcttgctgatgtcacactaggagacatgttattagctcatataatattcacaataactctgtagaatatgtactaatattatttttccctgccttttttttcttgtggagaaaattgaggcagagaggtaggtttgcccttaattatattttaaattatagagtaaatattctgtggcttcagagtggtaaacactgtaatactttaacattttcaaagcccctttgctacatatcatttttttctcttggtttacagagctactcagagtgataagtgcaataatcattaacaaccccttgttacaaatacagaagtaaagcaacttgccccaagtcacaaaaacaagttagtaagttatgaaattagttacatgcatggaatattcatgcttgaatgaaccttaaaagtttatctaacccaaacctcagattttacagatgaagaagctgaggcccagccaggaacagctgaactgtccggagccacaactggcagatggcagagctgggattagattgctagtaacctggctccaacctgcacctctgctctgcctctctgggctggaactagaacccagtgcttctgactttggatttagttctcataccactctcctgtgctgccttgttgaaaatccaagaatccagctgtggggataaggtctatatccatgaaacaactgaaaaccagcatatgatatggagaaaccataagaacaggaaactgccttaccacaagtaaaatgcccagatctcactctttggtaccagttcatagtgttcattgatcagcaattttttttttcagacattgacagcccccaaaacctggtgaccgaccgggtgacagagaatatggccactgtctcctgggacccggtgcgggccaccattgacaggtatgtggtgcgctacacctctgccaaggacggagagaccagggaggttccggtggggaaggagcagagtagcactgtcctgacgggcctgaggccgggtgtggagtacacggtgcacgtgtgggcccagaagggggcccaggagagcaagaaggctgacaccaaggcccagacaggtaaggagcattgttctttgggaatataagagctttcatgctaagtcagtggatgacaagttttgttttccttctctgacattggcagaagtcaatgattaatggaagagtgggatggcatcccttcataacagattgcacacaccatccctcattttcctttaactagtttccttgcaagtcagggccacaaggcagtctccaagctatgattacatggtcatgtccatcaactcctcttctgattgcatggatcttttgctgtagacagtatcgagggtctcttagtgagtttgtgagtgggaacagaaaatgaaaatcaaattttgttaataataatagtatattgaaaatttgactttaagaacgtagatgtcacatctgccatagcaaggagatgtatatcatttgctttatgacaaatgaatcacattataactataaaacatatttataactagaaattatgataagttctatgaaggagatgacatggtgtaggtatagagaataatgaagtagtgatgtttctcagataggaaggggaaatagtaataggatacacatggccaaaacaaccaaataacagttgcttaaacaagaaaggagcgtattcctcttgttgaatagcagagtgtacgttggccagagttttgaggataaggatagctcctacgttatattcttattttagtggaagcgatatctaaccatattttgtacagtgatttaatcagcaaaccagcatgatgagtgaatctatgatatgctagagaatattcaaccagggttttactttttgcggattcctttagtaatatatagtgagcattttccacgtgccctgcccactactaggcactgggaacacaggagaataggatgctgccctcttcctccaggggcttacatttagaagtggcttttagaatcttctagtatgaaatgggaggtctttactgacatgatgtgagacacaaaattgttagttcctggtgagcagagaccatgtcttttccaattctggattctgcacactgtctagaacatttcatggacagagttggggcttgatatacccttactagatgaataaaagatttgttttgctaaagacttggtagaggtaacagcctggattctcaggttctgatctattgtgctttctacttgaggagccaggtatatcttgggggagaagatgatgtccatgaaacagctaaaaatgaaacaagagcatatgaggcggaaaccccacacaacatgaaagggtttcaccccacgcaaaatgaccaccagtttctgcactctggcacctgttcatagtgcatattggtcagcattttttttttcagacattgacagcccccaaaacctggtcactgactgggtgacagagaatacagccactgtctcctgggacccggtgcaggccaccattgacaggtatgtggtgcactacacgtctgccaacggagagaccagggaggttccagtggggaaggagcagagcagcactgtcctgacgggcctgaggccgggcatggagtacacggtgcacgtgtgggcccagaaggggaaccaggagagcaagaaggctgacaccaaggcccagacaggtaatagaagtgaagagaagagcaaacccgggtagtagctgcaggttgatctattgcagctgagtgatgatgcagctgcttttggcatctgtaacctcagggctgcagactgttttaggagagtttgctgtaaaaacaaaacaaaacaaaaacaaaaaacaaacaaagaaacaaaaaactttcattcacccaaagaaagaacaacgtgttataggaaaggcgtcccgatccagacccttagaaagggttcttggatcttgtgcaagaaagagttcagggtgagcccatagagtaaagtgaaagcaagtttattaggaaagtaaaggaataaaagaatggctactagccatgggcagagcagccctgagggcttgtggttgtccatttttatggttatttcttgaagatatgctaaacaagaggtggattattcatacctcccctttttagaccatatagggtgacttcctgacattgccttggcatttgtaaactgtcatggcactggtgggagtgtagtagtgaggatgaccagaggtcactctcattgccatcttcgttttggtgggtcttggccggcttctttactgcaggctgttttaacagcacggtctttatgacctgtatcttgtgctgacctcctatcttatcctgtgacttagaatgccttaaccatctgggaatgcagcccagtaggtttcacccttatttgacccagttcctattcaagatggagtttctctggttcaagcatgtctgacaaaactatagtaatggacccagtgggagcagtcccatgaatgccttttttttcttttttttttttttttgagacagtcttgccctgtcgcccaggctggagtgcagtggcgctatctcggctcactgcaagctccgcctcccgggttcatgccattctcctgcctcagcctcccaagtagctgggattacaagcgcccgccaccatgcccggctaattttgtttttgtatttttagtagagacggggtttcaccgtgttagccaggatggtctcaatctcctgacctcgtgatccgcctaccatggcctcccaaagtgctgggattacaggcatgagccactgcgcctgggcccatgaatgtcttaaaactctttccaaagcctgtgtttttaatcattgtgtctctcagctataggaaataatgtaaaaccaatataaaattcttaaaaccactgattaaaaacctgttttgtggcaagctattttgtataggtttgaccgaatagacgctgtgtgatagaaaggagcaagtattcacctgggtggctggagccctgtttccttgcagtaggcagctgacttttaatgagcatcatctaagtgccaggcctggggaacacagtggtgaacaaaacaaatatctctactctcttgaagtctagagtgaagatagacaataaataagaaaacacatttaaaaccgtaaattatgctaaattctgtgaaggagatgaacatggtgtaggtatagagaattacagggtaaggatgtcttgcagatgggaagggtgagtagtaataggatatacatagacagaaacactcaaataacagttgcatcagcaggaatggagtgtattcctctctgtagaatgtccagggctgatacggtagctcctcgtccaggagacccaggcttcttctgtgattgttgcttagtcatccctagcaatttgccctcctttacctggtcaccaccctgtctgcattgtagccagtgggaagaggcatgatgaaagtcagggcatcactgggacattgcacatatcagcccttctcatgttccattgccaggtcccagacagacctcactgcaaaaaaggctaggaaatgaggtctttagctggatggccctgtgcccagctttactttggttatgctgtcctgaccaacacagcagctgctagctacatgtagctattaaaattatttttatttttattttattttcagagacagggtctcattctgttagctaggctggagtacagtggtatgatcacagttcactgcaggcttgacctcccgggctcaagccatcctcccaccttagcttcccaagtagctgggaccataggcacgtgccactaaacctgtaattttttatttcttttagagatggggtctcactgtgttgaactcctgggctcaagtgatcctcctgcctcggcttcccaaagtgctgggattacaggcatgggtcactatgcccagcctaaattttaattaattaaaaataaaataaaaatattttctcatttggattagccacatttcaaatggtcagtagccacatgtgactaatggctacggtatcggactgtgccgattatagaatactttcatcattgcagagagatctgttggacagtaagtgtgcttacagaagaagggggagaatggattttggcgaaaactagccatttctggcaaagggaagagtatgtgtgatgtcccccagctggaatagtacctgggatggttggagaatgaaaagaggccagttttgctggagcatagagggtggaagagcaagtggcctgagatgaggtgggaggagcaggggcagatcagccaggaccatgtggtacttagaggacaaaatgggctatacttattaatactagaagagtgatatgatgcagtgttcatttaaaaaacattttccaggccacagtgaggagaataaatggagaaaatgacaaggatagaagttgggaggttcgtagggaagctgctagaaaagtctgggtgcaaaatgctgattgtctaggtaagcatgatggcaaaagggacagagaagaggggatgtctggaatatatttttgaggtatggataatacctgttgatagatgtggggtaggaagaaaatgaggactcaagtatgacctgtgttttttatttgagcaacatgggagattggactaccatttcttgagaggggagactgagaaataaaaagtttggggagaaacatcaagacttttaaatatttaagttcaagatacttgtgagattccttggttaattgagtgattcatttattgattacataaatatttattgagtgtctaatacaggccaggcaccgtggtggagatgcagttgtataaactagtcaggggctcagaattaatagatattatggagcgattagcatccagttggtatttaaagccatgggcatgagtgagatcacctaggtggaaaagtacagagaggaaaagagggagctttgggacaggtgcagtgactctcacctgtaatcccagaacttttggaggctgaggtaggtgaattgcttgagctcaggagttcaagaccagcctggtgaaatcctgtctttacaaaaaaaaaaaaaatacaaaaattggctgagtgtggtggcatgcacctgtattcccagctactctggaggctgaggtgggaggattgcttgagcctgggaggtcaaggctgcagtgacctatgatggcaccactgctctccagcttgggtgaaagaccgagactctgtatcaacaaaacaaaacaaaacacaacaaataacagagaaagggagctttgggtgctccagtgtttgaaggttgaagtcatggaagccagggttgagggagtatgtagtcatggaaggaaggagtggatcagctctgccaaatgccacccagaagcagtgtaaagttgagaatggcaagtatgcattagatgtggcaacacggatgttgttggtgacttagactagcagatttagttgtgtggcatagaaagatgcaaacaggattgattggagagtgagcagtgaagttaaggtatgtagacatttctcttgagacaatctgtcagtttaaggttgcagagaaatggaatgatacgggagaggatgggggattctagaccttgcttgtctgggactgatgacagagaagaagagaatgatgacacaggagagaaagggcagatctgcagcaaagtccttgagagggtgggaaggcctaaaattcagagcgaagagtcttggctttaacataagatgtcaacaggaacttggcctagaccttccatttccctgggcctccattctcatccccttttataagtcggaaaggttggaggatatgacttcttggctctcaaattctgtgaaacaaaataactagataccagggagatcagaaaagaggttatatccacagcagttttggtggcttatcttgttgctcaggaagttttattgttattttgatgagaattacaaggacagaaattttttatattaaaaagtgggagatgatctgattccttccagttttatatccagtggtttgtttccttggaaatggagaccaggggcctttgactcgtgttttaagtggaattctaccattattaatgataacatgatggagagctcctggtgatgaggtggtaagatgcgatgtcttcctttgttctaaagttcagccttttctaaatctttttaaaaagaaattgacggccccaaaaacctagtgactgactgggtgacggagaatatggccactgtctcctgggacccggttcaggccaccattgacaagtacatggtgcgctacacctctgctgacggagagaccagggaggttctggtggggaaggagcacagcagcactgtcctgatgggcctgagaccaggcatggagtacatggtgcacgtgtgggcccagaagggggcccaggagagcaagaaggctgacaccaaggcccagacaggtactgagagggaccaggccaggggaacacctcacacttaccaggagagaaccttcctccatcagtgggctggggaggggagcaggagggtggttgctttacccgaggacattcttcaaagtggttccttttttacgtctttgagctaattaagttgacacaacagctcagataagatgagagagtatagagggagtgctggtgtcaaaggtggcctccctcacccctccacccggcccagcgctcagaatctccacacttgctatggagaaaatggttgggcctcagctgcagttgggagaagacagaggcaggagcctcttctgtttccatcttccagaatggaggcaatggggatgcatctttctccattccatcctcagttgatgatgaaaggtgcctgaattgcatgtattttgtgtgtgtgatggggcctctgatcttggcagagcatcactgaggtcagaacccagaggcacttggaagagagcactgtgcccaccctgaggtctatgagcctcttctggcagtacgggcaaggtctgtccattccatccatggctgagctcaccaagtgttgccacgggacctagagatggcttgaatttctctatggtttttattagttaaaattagcttgcatttttaatctaaaaagtaatatatgcttatagtaaatattttcaaactaaatagagacgtgttaaaacaaaacaaaacaaaacaaaaacggccaggcgcggtggctcatgcctgtaatcccagccctttgggaggtcgaggctggtggatcacctgaggtcaggagtttgagaccagcctgaccaacatggagaaaccccgtctctactaaaaatacaaaaattagctgggtgtggtggcaggtgcctgtaatcccagctacttgggaggctgagacaggagaattgcttgaacccaggaggaggaggttgcagtgagccaagattgcgccattgcactccagcctgggcaacaaagagcgagactccatctcaaaagcaaacaaacaaacaaacaaactcctctctctgtcccggactccctagtatgcagggttgctctccagatgcaaccagtagccagttctcccttcttccctctttcccacttcctacctccttctccccttcctttctctgttcctttctctcttattcctttcttctcctcttccttgtttatcttctcttgggttcaccttctccatttttgaagacagcaataaaaagattctcattttcctgcttcatagaaatgtgaaagtaactaagacagacatctcaagtccataaccagggagtggtgggcagtcaaagaggtggcaggagattgcttaagatgttaaaatagccacagttttgccttgattgtgaaatcaggaaattcagtttttctgtgagacgaatagaataaaatccatgccagatgttatgctttagaaaatcaaaccaagttgatattacagaaactcaaaatttgtcaaaacatcctaattcaaaacaacagctgtctgatttctattaaaatactgcaattcagctctcagctgaaatgctactgggtagaaaatagcctggagacgtctttttgggaagttataaattaaaataaccttctatgataatgctttttcaaaagagaaatttccattcatatcttctttggttaaaaaaaaaaagagccttctgaccagtgatgttgaccagtatttttgctgagcttctgttttcctggtctacagtgcacacttgcttacccacgcgttccctctagtgtttgggtgaggaagtacatagaagaagagctctgcttttcctatatcccttctctttccctcttccctcccccacctcttcctttcttctcttttccttccttctctctctctccctctttctttctctttctttctttctctctctctctccctttctctcttcttttctctctctccttccttccttccttctctccctccctccctcctctctttctctcttttttctctttctttctttctttctttctttctttctttctttctttctttctttctttctctctctctccctccctttctctcttcttttctctctctccttccttccttccctccctccctcctttctttctttcttttttctttctttcttttttctttttctttctttcttttctttttttctttctttctctctcccgctctctctctcttctctttctttctttctctcgcttctctccctttctttctttccttctctctctctctctctctcctctatacaagcacctgttcccttgccttctccttctcttctttctctactgggtatgcatctaaggccacacacttcaatatgtaacagtatgtaagaaacataactttttgtttctttcttttttttttttttttttaagacagagtcttgctctgtcacccaggctggagtgcagtggcgtgatcttggcttactgcaacctccgcctcccgagttcaagcaattctcctgcctcagcctcccgagtagctgggatgacaggcgaccaccaccacacccggctaatttttgtatgtttggtagagataggatttcatcatattggccaggctggtgtcgaactattgaccttgtgatccgcctgccttggcctcccgaagtgctgggattacaggcatgagccaccgtgcctggccaactttttgtttctatgccaacttaatttcaatcataagcccatattctacttagggtaagctccttcctcagggctgtatgtaagtcttgggtagtttcccagtgacaggcattggggcccatccagcatttcaggcaactttccaggcgggccaagtcaccctggtttctttgtgcatggccctttcagatctgtggccctcttatctttccacatccttttgggagccctgccatctctgaggatctatctgccaatctaggctgttaatatccaccactttgtgggaacctgcctgggaaatgggggcccagattcctttcctctgggacccacccaacgccctgttcttcttgtctctaatgggtctgtacttgtagaaacaaaggtcagaaaggtcctgtggcagggaggaagagagcctgcaaactgcttgaaagaaggaggagaaatgggagggtttgaaaaggggaaaatataaactgatgtctcaaaaattaccttgcctcagttgtatcttagtaataacaattacctgactttctacgtacagaactcgaccctcccagaaaccttcgtccatctgctgtaacgcagtctggtggcatattgacctggacgcccccctctgctcagatccacggctacattctgacttaccagttcccagatggcacagttaaggtacggggattccttgtcttttctcctggtgccttctcttctgtgtgaagcaactaacttgggccaatcagctcatttgctggcctcacggcaacttgctgatctttactgatcacattgctggttgtacatctgccccgggttattttgtttattgttagtcttccccaataaatgtaagctctatgtttgtctgtttcatttatcaccatatctaaagtgcataggacagtgcttagcacatggtaggtgttcgatatatatttattgaacaaattgattaacccttatttcaagggttatacctccccttagaatctgaaggccagcaaattttcaaaacctgtcccaatggaaaattattattctccctccttgccaatgaagaaagaagggaggaaataaaaacaggaaggacacttaggtttatgtgttaccttaattagtgcttatgacagcacagctaggaaggttagccctatgtttatagaggaagtaagactggttcagaaggaagtttattgaaatatcaactatctccttgtctcagatatcagtggccagtttcacctcccctattaatttctccttagcgcggcattgccagcctgttcctgctggcaatgtagccactatagttagagcccctgtgtgtatctgaaggccaaagtctcccagaaacttggccggtgatcctgaagctgcagtcctgggtgctggttctcagctgatgctcccagtagtgctgactctccatggcatggctctccagagaagtggctgggacccactgcgattctgggctgccactgaggcttcggagagacaaaacactgtgctctcagagagcttctgtcattagcaccagggaacgctgttgacacctagggtgctagtgggtgataaactgagtcactggctgtctaatctctcccttgtttggtaggagatgcagctgggacgggaagaccagaggtttgcgttgcaaggccttgagcaaggcgccacctaccctgtctcccttgttgcctttaagggtggtcgccggagcagaaatgtatccaccaccctctccacaggtaatatggaatcctgtactctgaacgaccatgcaatgagaaccagcatcggaaagcctagcaaaggagtccagggaggagcaagtggatgcagaactattgatttctctaggcatggggaagtggaaatggggttgtgtgttcaaaagaaatccaccccacagtggggaggctaaagagaggagtgaaatagagtgttactttgtgagggagctgagttgggggaggaagtgatgtgaacttgaccttttcctggtgcatttggggagttgatgagaaaaataagatatgagtgaagagttggaagaagctgaagtaggaagttatgaaataatttccaaacaaaataaattgccttaaaataggaagaaactccacctctttcctccttgcccttgtcctaacaacactctctctgcttggctcccagttggtgcccgtttcccacacccttcggactgcagtcaggttcagcagaacagcaatgccgccagtggtctgtacaccatctacctgcatggcgatgccagccggcccctgcaggtgtactgtgacatggaaacggacggaggtggctggattgtgagtcacgcagaaccctggggagctctgtgtagggccttccttctcagcccaggatgccggtcatggatgctccatagagtgtttggagccctatttcttctccactcatggaagagaggagttttggtggcttgtagctgtttttagagagatcccaatgttacaggaaaggggtccccatccagatcccaagagaaggttcttggatctcatgtaagaaagaattcagggtgagtccacaatgcaaagcaaaagcaagtttattaagaaagtaaagtggtgaaagtacagctactccatagacagagtagggcgtttctgaaagtaaggaggaatgcatgcaccctatgtacaagacttgtttatatataggataaaaaaagatcatgaggggatgtgctctattacaatggttcgtgataaaggattaattttcttaattactatattttgcgagaatcaatattattatatttaaagcaacattaggagtgcttctgttctcaagatatcaggacattcctaagtctgggtctgtttagtaaacactgtcaatctgttcccttaaccataaacatctggaggctaggaatacctaactttctgggaatgcagcccagcaagtcccagcctcattgtcttagcactcactcaagatggctctggttcaaatgcctctgacaccaatcaactgtaaggatagagcctagtacttaaccactgtcctagaacaggcttggttagactaaggctgatgactatgaaggcttgtgagttgatcatcatctagtaatgccttatatgtatgtattacctatattttaccttcttcaaagcacttctgtacacatgaccctcacacaacagctttagagtaagtgagagaggattgtttttcttattttacagatagggacagtgagtcccacagaaagaagtgcctggcctaagtcatacaagaatgacaaagctgggaccagatttcaaaactccagcctcctaatcattggtcttctcagtgagttcatctcaggtcatccaagatgcgaatgcatagcctgactggggagttcagacctctgaactggagtccattgtccaagttctgtaccctgtctccacagtacagcaacaaggcctttgaggttttgattggaaagactaaagtctgaaagacggaaacttgggcaatgctctaattgtccctcttctgtgtagatgttttattctcttgggccattgtctgcctaaaccacatggcagcttctttgattgcatcagcctgatccaattatatgataagctgtttttgagggttgcaatctgatccttccatctccccttgccccttttctccctgtgcctgaatgataaagactctcactgctccaagccagcatgcagccttaacctgctgtgcatccgcaactcactgtgggaaagagagagcatgatctcatagtgctcaaaccttattcatttacacattcactcaggggcctgggaaaccaaagacacttgagcagccatgaataaaaagataccatctgatgagcagcaatgaagaaaacttattatctgcacagcgacatctgacggttgaaaggcagtaattggattggctgggggaaattcccgattgatttataaaaacaacagagcagaatgtaacatgggaggtcttccacttgaccagacccatagggctgtacctgctgcttttcatcagcaccattgtaaggctaagcattctgtcccttcaggcctgcagcccaatttcctgcctttgtgcctgtaattgacttttggcaggacgtttgtattgtctagtgtggcctttttgtaagccaagctcccacacagaaggagttatctggggcaacatttagaaagagatctgtcagtctgtctgccctggaatagtcatgacttattgcacatatatttattgagtgcctactatgtgtcggcactgcttcatgtactcaagatccagcagtgaaccaaaccaacagaaatccctgcccccaaggagcttgccatttacatcctgctcatgcaaatgacccctcctcaaacacagagatcggttccaaaaataataaaaccactgtgcattctcaccctccccagccccaaccccaccccaagtcttgttttctgagccagactcctgggggtcatgcatgaactgaggttctgcagggttttacttaaagccaccatgctccagaaaacatggagtcctgaaaacttccccacaaaacattttactgacagttgttacagtttttttgggggggttcaagagtcctttgtcactgaaggatgacccatggtctgtttctctgttttattgagctttcaaaatccttttatggtaattcttccatcccaagcaacaggaactcaatctgaagaataggccagaagaactgtgccctgaggtaaactctgccgctggtgggaggctggaaagaacatcagggaacacttaatgtttcaaatatttccatctttgttttccatcttgaaagtcttaatgcattagaggctctttccacagacatttcaatgcaagtttgactttttttctctgtatttagtcattcagggcattgagtaagttctagaatgcaatgacaactctagtatagaaccagacacaaagaggtttcttttgtttgtttgtttttttccctttgaaacttatttggtaagggggttttgtgatacccaaatagttcattatagggtgttttcatctcatagaatgggagtggattagactctgagtgagtcaattaaggctgcctgatcaagatgtataaatgatccctgtgggtcagttcatttggaaactgatataataaaatgcaaactaacatttattgagagatcataataacttattatatctatatatgccagggtctggcttaactactttatgatttactatgattaatgatcttgccgaagccttgatttaagatcgtgacggagaggctgttaacatcttaatctaacagtttagaaaagtgaggcttgtcaaggttgcccaaagacacaactagtaagtatagaactggttctggttcaaaacagtgatgcaaagagcaccagaatcatttttggaagcttccctggcccagatgaagtattattacacacacacacacacacacacacacacacacacacacacacatcgctggaaagctcctatcaagcttgggcactgggttcactgataggagatagagaccaaatacctttgtaatgcattctaggggggcagggttggatttgagcctgaccttgtggtgggaacgtgatttgacgcgatgtacgtggagccatacatcggtgctacatgtatcctaaaattccactgtccttggtacaacaagagtcccaaggaaggggttggaccaggcaccttgctaggaaattagcaagttctcagagtctttgaaaattcgatttgggaaacagattcagtagggctggtattttcaaactttctgacagaaagataagatttatgcgtggtctttgtatcagtgattagctgtaggactctggatactcgcttttctggactttcacatctgtcaaatggcatcataaatacttgctccagggccagcactcacgaaatgattgtcgtctaagtgaataaatgagtgaagaaaagtgagggaagccaagaaggaaatagggcatttttaaaagatggatacttgagcaaaggggaaagagaacaacaatgttaatgtggtgttagctgtttgccgtgatatttcctacattctgttcagtagctcttgcctatttatagaacatttttatgtggtgtctcatttagtcctcccagaagtcttatgaagtaggctcttctcttcccttccattcctgttttaccatgagctggctgagggtcagcaatagaagaggctgcctcagcaatccccacccatcccctgcccaggaagtggctgtggtctgacttggagtctggagccttctgcatccatggtgccccactccttggccagcagacatgaatgggtgctttggaaggagttaaatatgcactcccatgtggagctttcagcattgctgcagggtaacctactctctcttcccggagaaaaatataaagaaggcacaaatatcaggtggtttaccttataaattcaagataatgtgttttacttcaaggcacatgctgtgaagtctagtggaaaggagggagattagattttgtgttggggcttctgcatctgaatgaatgcaaagaaaaataggcagagagagaaatgcaattctagcctttggttagtgggaatcgttcctgaggttagctaggatggcattcagcttggctctcaaggtcatgtggaattagatgtattatcaattccaatagtgtatacaggtgtgtgtgggtacttttcagatttacttcctataaaagaatccaatttactgtgactggaactgccttccttctccaaacagaggaatttttgaaaagaaggcagtccacactttggtgaatggcacccaactctgcctccattttcttgcttctcactcattctttggcccgttccagtttggcttctgtccatatctcacactgacacagcccttgctaaaatcaccagtgatttctgtgccactaaattctagggatggttttggcctcctgttccttgagctctcatcagtacttgacactattgaccacacctttctctttgtggcttttgtgattccatatttttctagtttctttttctccacttctgttgccccttctctctccttaatggattcgtccttcttcattatacatattggatgtcctcaaggcttgattctaggccactttatcttttcagttcccattttcttcctacgtgatctcagcttttcccatgacttcattttaccctcctctgggtcccatgcttctctgtactaattaggatagaatgggctccaaattccagcgactgaacaaacacagtgtatttttcttatatgtgcaatgtgttgtgcaggtttggcagccagatataagtgtgactcagggattcaggctgtttccatcttgtagttctgctgtttcagtgtgtggcctttcccatggccccatggtgcatggcagtagaagagagagtgtggagaacccacccacacacaaaaggctcccacctacagccttttggctgcaaacagtcacatggctccaacttaaatgcaagggaagctgtaaatggacatcctcctcctgtgttcctgggaagaggaaagtgaactgggactcagtgaactcctagcattgcctgagacacactctaccttaataagtctagcatagacctctctttagaactccagcccttacatccaattgctctgtggtattttcattcactagcacacctcagaaataactcacacttaaccacatccccaaatgagctcatgacccattcataaaacctgtacttggccaggcgcagtggctcacacctgcactttgggaggctgaggtgggtggatcacgaagtcaggagttcaagaccagtctggccaatatggtgaaaccccgtctctactgaaaatacaaaaattagccgggcatggtggtgtgtgcctgtaatcccagctacttcggaggctgaggcaggagagtcgcttgaacccgggagacggaggttgcagtaagccaagatcacaccactgcactccagcctgggcaacagagtgagactccatctcaaaaaaaaaaaacaaacaacaacaacaacaaaaataaataaataacaataaactaccacctgtcctctctgaatcccccatctcagtgaatagctgagagaagagtcatctgcaagcccatactataagaaacttatcttaccttgacttcctcctctttcagttccacattctgtcaccacctctgtcaactttaccttctatgcacttccatctattctcagggcattcctcatccaagctactgtcccccttcatctgcactctacagtggtctcctaattggtcatctcacttccactcttgcccctgaccagtccattccatacactacaagctagagacgaatctgattggatctcatttcctgcttaaaactctgcaataatttccagcgctcttacctggaccaacgtcttcaacaatcccttttaaaggctcaccaggactgactcttgccatcttctcagcctccctttccatcccttcctcagcccccagaagccccaacattcacccccgtgctcttgcctgaccactcctactcatcctgcagctcagccatgtcctgggggtggtttcttggctccttggtcaggtcctcctgttttatgctcttacagttctgttgcatctttccctcatagcccttatcacagttttaactgcatttaaaaattatttaatttagtaattttatttactgaactattagttccaggagggcagggactatttctgatttattcactttgcacactatcttgcatattgcctagtacatagtagatgctcagtaaatatttgttgtgtgaacttttttctccataagtattaaataatcgctatattaagaatcaggtgaattaaaaaataattcctaccctcaaactatttcagaaaaggggaaaaaagatgccataaacatgatgtgccccaattgagttgaatgggtgttgaaagttacatgtgagagttagcagaggtctggaatatcttgccctagacaacccacactagcaactgaatcacacaactaacggaaagaattgaaatttcttgagggcaggaaccttctctgcttttgctctacatgtcttagtacctggcatactactgtacatataaagaatgcttattaatatagtgaatctactgacatataaataaaaagcctctctagaatgaaaggcttgctagctggaggaaggcagtgtatgagcaagctcttggtcttctcttgtctcccagcacctatgtctgtttggagggtcagagtgaagtattcatcttccttctcaggtcttccagaggcggaacactgggcagctggatttcttcaagcgatggaggagctatgtggaaggctttggggaccccatgaaggagttctggcttggtatgatctcagaatccaggaggctggggctgtggggggtgatttctcccaggacaagctagctaggaggcttagggaagctcaccaccttcacagagaggccccagtggcagggagacagaggactgtgccgagcagggtgttggtgggcatgttgatgggaaggctgtcttgcactctgaacttgttgaaaggtagggtggtcacaggggttttatgctgatttaagctctgcaggatctgcctgcagcctgaagatcttagaagccacagtagtagaaaaaaagttcagtgattgggatgctggtccattactgggaggtcactctagcagtctctaaaattctgttcgtgatgccaggcattatgagcaattttttcccccttttccctctgctctcctctggagcagatgttcacagacagtgaaatagccaaaagcatgaattgggaaatgaagaattaaaaagtcatagttcagatacccagtgtctaataaagtagatgatgtttgtggtttgctcagtgtaaaatctctttggggatcttaggatgagtcgttgacctgctctcctacttggtgagataaatggatgataaatacaactgcttctgttttagaaggatggagccaatggaggcagattccttctggggttaccctgcccccttcactgctcccttccatagaatgtggtcttcgcactccttagtgtgactatgagcccccaaaagagaaagtgctgagactgccccttattagcagagaaggtaaagactaaagtgactttaggttctgaaaacctcagacacacatgttgagtgcttactcgcacacatgggttgattgattattggaattccattttttatttttaggacttgacaagctacacaacctcaccaccggcactccagcgcggtatgaggtgagagtggatttacagactgccaatgaatctgcctatgctatatatgatttcttccaagtggcctccagcaaggagcggtataagctgacagttgggaaatacagaggcacggcaggtgagaaaaaatgttttcttactgcgaaggtctcttgctgtctgttgtgtaaggattggtttgccgtgtgccactgatctgggggatggaatattattctgtggaggtgaattgttctcattgacagtggaggtcctactctctgcagggggtcaggagtgaacaaatagttgaagcaatccttgaccaccataaaattggaattttgtatgttatatgtcatccccccaccccaataaaaaccctccccttgtactcctcttattcaggctgttgtacattagctgatgagcccatattctgaacaatttcttgatgcttgtcagtctttcattcggctttagcagtgtggctgtcatctttgtctgcacagtagtgtgtgtgtgtgtgtgtgtgtgtgtgtgtgtgtgtgattgagcttttggtggcactttgctataaaaacagaataaggaaagtgctgattcaaataataagaagtataggtctcattaatttaattcaactgtgacaacacagaaatgagcagttcagtggaaagtgaaggaacctttagcctctagtagctgctcattggagctaagccagttgctggtgtgtttggttgtgagggaaaagagcaaaattaagcaacatgactgaaatgctggaatgataccagtaaattaaatacattatgtaagagggggaggtgtggtcattgttttaataccaatattttaaaagcggtatttatggcttttaaaccataacaagtgttttgacatttgcctgtgttttgacatttgcgtttttgactttggtgtatttacacaggaatgtgttaccagccagactgaccgactgtataagacatggcggtctctctccttagacttaaatgtaaataggtgaatacaaatagaaggtaacttttgcagagagtcaaataaggggtgagaaacataaacagttacaggagtgtggagaaggtgggcacatggagtacgaagcaactggagggagctggatctgcaaaaaggggcaaactcaagtgggaggaaatagagggctctccaggcctgggggctttagggtgagtagggactgagcagaggcaagaatgctggagtttatctcacagccttgctggacttctcaagaccatgtactcaaggacccctgatggcagaagactgtgaacagaacttctgagtgtctggggccatgatctgggtggccaactatgaatgcaaaccttctttgagatcttataatttcatttaaaaaatagtcacatgaattttgcatttgttcttgtttcccagtgcctatctcagagcctggtacagagtaggagagtttaaaaaatgaaattgctagcaggacttttctatatacataatcttagggatgtttagtatcttacattatagtccctgagacccaaataagttccataggggtgaatgaaaggtgagtttggtgacatggtgacatgggaggggacaaagagggaggggtaggcacctaccagagtatgaggcatttgggctacagacacggggaaactgttccaggattctgagtaggagttgggtgagaaaaagtatgcaaagaattatttcagggaaaagacaatccttgaaaaaaaagcattgcagctagaagatcctcactgcctttggatactgtcacttctttcctaagtagtcctgggtctccatgggctgaagacaggctgtgctacatgtacttgaagtataacatagtcatgcattgcttaacgacagggatacattctgagaactgcattgttaagcatttcatcattgtgcaaacatcatagaatgcacttacacaaatctagatggcagagcctgctatagaccaaggtatatggtgtagcctattgctactaggctacaaacctgtatggcatgttactaaatattgtaggcaattgtaacaccatggtaagtacttatggatctaaatatatgtaaacatagaaaaggcacagtgagaatatggtataaaagataaaaaatggccaatctgtaagggtacttactatgaatggagcttgcaggactggaagttgctctgggtgagtcagtgagtggtgagcgaatgtgaaggcccaggacaggactgtgcactcctgtagactttaggcacactgcccttcggccacactaaatttatttaaaaatgttctttcttcgttaataaaaattaaccttatcttattgtaactgttttactttataaactttaacatctttttcaatttttttgactcctttggagtaacacttcgcttaaaacataagcacattgtgcagctgtacaaacatattttctttctttatatccatattctgtaagtttttttttctatttaaacattttttatttttattttttactttttaaacctttgtgttaaaaactaagacacaaatacacacattagcctaggcctgcacagggtcaggatcatcaatatcactgtcttccacctcctcatcttgtcccgctggaaggtcttcaggagcaatagcacacatggagctgtcatctcctgtgataacaatgccttcttcttgaatacgtcccaaaggacctgcctgaggctgttttacaggattttttttttgtaaagtactcatacactctaaaatagcaataaaaagcatagtattattcacacaaaccagtaacataattgtttattatcattatcaagtattatttactgtatgtaattgtatgtgcaagacttttgtataactggtaggtttgtttacaccaaatcaccacaaacacatgagtgatgcattggtctgcaaccttacgacagctgtgatgtcactaggtaattttcaggtttattgtgatcttatgagaccactgtcgtatatgcagtcccttgttaactgaaatgttcttatgcagggcatgactgtataaaacatgaaagtcagatatagaaaaaggcagttataatacagttgggaaacatagatggacattcatatgattatgaggatattaactgaataagaggggatttaaagatgctattttgtgtgactaagcacactgtccatatcctcccaccccatctctaaatgagatcagactatgttcctgacagcttattccaggttcttccaaccctttggtataatacagtacacacattccagtctgtcccagagcccttgggcctcttcagtccacatggagtccatctgatcatttctttggtttccagtaccctgttgtctgctcttgatcatggccatcggttagcctcagcctttccttctcaggttaaagaagtctacataagctccatgcgtgggaccctccctggacacaatatgaagtgggtgtttttctttggcccgtgtgccccacatctctccctgaaacccagtgccctccctggcctcctggtcaggaacctcactcaggcctgtcctcccgggctgcacatttcctttcccttggccattaccatttgccttttctgaagcctgtgttaaagtgatccagcaaatgaactgatgccaatgggaaagagactgaaagggagtcaacatgtttggtgaattatttaattctcctcccaggtactctgtttgcatgttaactgcaatgaggggataattcctgttctaaggttgttcaggccaacagtgccagcaagtagaggatgtattttttaatagaattattttttaataggagactttcacacagcatttaggcagcgatctagtcttcccatgtgtactatcattcccgcttttaaattctgaattacaatggtagggttagtggagttttagcgttccttatgtacactgatttgtccatgaggagggtttcagaatttagaaagctcctggctactcatgtcttgaatgctgaggcactgtttagaggacacggcattcaaatggaaggtgaatattttgatacctccctgcacgcaccagctctccccagcctctatcttcattttagctctgattagaactggcatgcatgcagcctggcaggaatgtgtggcttaaggcttgctccccactcagactgtccaggtgggccctcaacttttgacttccactcaagttatatcagaaagtccattttcccttcatgaagcaaattccagcaaggtaatgatgtgtaaatttagtttctgattctgagtcttctagtgggggcagggaggctatcttatgagctccaccattaagatgttattcatctatttagagatcataatgcaaacataaagagctaggcattcagaatggtgcagaatgaattctagggctaaccaatgatttacagctgatttcgagtcccacctgcatgggccacagtggggacacaaccagggatggatcccaacctgggggcatttggaaatgtgactggggagctctggaagcatttagtgggttgggaccagggatggatttttaaatgctggcacctgaaaaagaaaaaaaaaattaatgggtacctggatgaaagggagagctagaaatggcacaaatcatttgtaatcatccattcctaatcctgaaataaaagacattcaaggttctgacacacactactgtgtctgtgtgtgactgacaggggatgcgatgttaatggcttctcctgatctttgaaggttcagctgcctgggccatctttcccaacctggtgaatcctagagggggagagtgggcctcagagggacattttgatgagatggatggtgaccaacttgatcccctctgagtttgggcacagacctttcatgggcctgccatgaacccctccagtcctcattctcactctctacactctgaacattaggatggcttcagtttctagaaggtagaaaatccttctgcagaaaaagacctcccacatttgggtgaaaacctgctttacctttctttatcccagtgcccaggtttagatcatcacaaacatgtctttaagagagcctctgcacagattcttagaaagcagccctgggaaccttctatgtaaattagctaagctgtgctcatttaaagaaggttactaagggagacactgcacgttatttcaagctgtggttaactttctgtacaaagtctagagggaggcggaaatgtgtatgactagcatgacaatatacctttcttggattggagaaaactactggagacagacctgtctgctgtgtttgcgtggaagtggcctccgtggccccagaatcctcctgctttttctgggtgaggcataaacgagctgctggtgagattgcagacttggagggggcaaattaggaccttcccttttaacatatgctaccaactctgcatattcaccccacccactccaaaaacgtttttgagagcaaggaccttcttatttttgtgttcacagagccaagcatgtgctgctccatagcaggtattcagtaaatgttccctaaaaaacaaataagtgaagttgtagaccagaggttctcacactgtagcctgcgtcagatcatcggaagggcttgtcaaggcataggttgccggggcccaacctgtagtttccggttctgtaggtctgggctggggccaaataatttgcatttcttttttcttttctttttttttttgagatggagactcactctgtcacccaggctggagtgcagtggcacgatcttggctcactgcaacctccacctcccggattcaagcaattcttctgcctcagcctccagagtagctgggactacaggtgtgcaccaccatgccaggctaatttttgtattttcagtagagacggcgtttcaccatattggccaggctggtcttgaactcctgacctcatgatctgcctgcctcggcctctcaaagtgctgggattacaggtgtgagccaccgtgcctggcccatttgcatttctaacaagttctcaggggatgtggatgctgctggtctgggaaccccacttgaagagccattgatagatagctctctcttgctagcgtgcaagaagccccccattgaaacaaggaaggcataggtggattggtgtctcagaaagaaccctggacttggaatctcaggacagagatttgagtcccagctctgctgtttgtggacggtgggaccttaagaagttcctagagtctaacctttttgaatttgtttccccacgggactaagagctgccctgctcacttcacagggttgctgtgagagtgagatgagaatgcacatgcgaagaagatcgctaaacttagagctgagatataaatgtaagaatctttattgcaggaacagagcttgatgaagcttgtgattgatatgggcccttattgccttttatgagcagaaaaagaaagcttgtaaaaggatgaaaaatatgatagggaaacaggagatacataagcaaaataattaaagcagttttccagatgggatgtaatgaaggactgaattttacatgtgtctccagaagggctctggaagttcaggagtgtttgtgtgtaggtgtgtgtgtgtgtgtgtgtgtgtgtgttaggagggtgcatgggaagaccaataaagagaatcttctttagaagtggccttgagctaggctttgaagggatggttgggatttggacagatgagggcagagagaaatctcctggaaggtgggctggtccacagtggagggtgtgtggtggagatggtgggatgcaagactgtgcatagggcacaaccaacctacaggcctgcaaggcatggaagaggaattcacctccacgtggtatgaagtagactgttaggcctgagatgatgaaaatggacgtctaaactccagaggggctggcaggcaagaagccagagagaaggctgttttgttaacacagacccaggatgagagaaggccgagggtggctgtcatgggagcagagacataggggtgtatgtgagtgacctgcagagggagggcttgagaagaggtatgaagggattgccaaacatggctccaggttccaggtctgggtggtgtggagaagggtggacccaaggcagagtggggagagtggagagtggtgctcttgtgtgtggtgtggtcagggacttggggagagttgttatgtttggatatttgatctgactgtggagcttccaagtgaaaatgctatgagaactgttggagaaacaggcctgaagttggggtacaggccaggaaagacagcttgttcccatgtgtcatgttcccatttgggctgttttgagagagcggtgactacctgtgacatgactggctgcatctttggcattttcatgcctagagatcttcctgctgggtcctcttttgatcatctcctcggtggctaaccctgggctctcgcctccgtctcttctctcctgcaggggatgctcttacttaccacaatggatggaagtttacaacttttgacagagacaacgatatcgcactcagcaactgtgccctgacacatcatggtggctggtggtataagaactgccacttggccaaccctaatggcagatatggggagaccaagcacagtgaggtaggtgacaggtgaatgtcttttctgtcccagggtatgtccatattcagcttccaaatggacaccctccaggccagtctggcagcccctctccttctgaagcttccagtcaaagcagtagagcttctcctccaggctccatggccttgaggtcgtggcctcccttcctgatggccatggccctgcttgttttgcattcccagagctgcacacttgcctaggggaaggtgcgggaaaagcttgggctgcccactgccatgtaatgacagatgatgtgctctgcacgctgtctcattttactagttcacacactgtcagctctagctgctgtaacaaaataacacagaccaggtggctcaaacaacagacatttatttctcacagttctggaggctgggaagtccaagatcagactgctggcagatttggttcttggtggtggaccttgctggcttgtggctgtgcgtcctcacatggcggacagaaaggagctctgatctcttcttcatataggggcatatgtcccatcatgagggctccacctcatggtctcatgtaaacctaattaccttccagaggccccctctacataccatcatgttggtggggggtggttagggctttactacatgaattttgaagagacacaaacattcagtttataacaaacactgcctactttctagttgttctcctagttgaacaagagctatttctttaggctgagcatggtggttcatgcctgtaatcccagcactctgggaggctgaggtgagctgattgctcatgcccaggaatttgagaccagcctgggtaacatcgtgaaaccctgtctctacaaaagatacaaaaattagctgggcattatggcgtgcacttgtagtccctgcctctagggaagctgaggcaggaagatcacttgagcctgggaggttgagactgcagtgagccatgatcaagccactgcactccagcctgggtggcagagaaagaccctgtctcaaaaaaaaaaaaaaaaaaaaaaaaaaaaagctgtctcaagtcctttgatcaccaggaaaacagtcttttgtgccttaggtcagacctactcttggatccacttcacccaaaaccttcccagaacattgagctagaccagtctctccacattgggagtgtgcgcccagggcccaggggtccaggagggctcctcttcccacattgccctgaaactgtcccacccgctatttctcaagcctcctctgccccagtgcatcatcctgactctttgacagctgcggggcacttcccacctgctccctcacagtttcttgaaaattgcatctttgtctctgctcgtcattaatcctctcccctccacaaaccctgagtccccatcctaggtttctaatttcccatctgcagccctgatcctaagcctccaggaagccacctcttcagaactcaccttgtaccaatattactgtaaatattagcacatccgaagtccaggtacattttgattactttggccctgaccagtcttcgggactcccaatctttatgtgatttttcaaagggaagaagaaatttgcccccagggaagctggggagggtgggcccatgaatcatggtggcagcgtgtgggctgactcagggaagccagggataggagatcaaatattggaaacgagcagccaggatgccctgaaccatcccatatttgctaataaaagacattcatctgtttaatgcgcttttcacagtctgcaaggcatttagcttcttgtttattatttacctcacaaattaaaatacataaaattggtcacttgggctttttattggccaggttgcagggttattaagtgaattaaatattattgcgctcaccagtcaaaagacataaaatgaaatttagttttcagcaggctatttgttaccccagagctaatatctaaacagtctaaattgaaaatgattttacacaactggccaattaatatgtttatttttgcctttaattttttggaaaggaaaagagtgaaggaaagataatttgcccattgccggcccggttgacccctgtgttgtctctgtggctgctctggcctcacccagctcccgggctcacacccccttgctcccaccatagagaccgccagcttccaaatcgtccaagtcctctcagcccgtctaaccccagctgcccagcagagggcgcgtgtgtccggatcctgccctcccctcccttctcatcaccccgtctctttctctctcctgagcagagagggagtggtttcactggtaattaattaattaattaattcctttgtaccataacccaccctgccctcctcctaagagcctcttcttgatgtggcttttttttttttttttggtagggggtgaactgggagccttggaaaggacatgaattctccattccttacgtggagttgaaaatccgccctcatggctacagcagggagcctgtcctgggcagaaagaagcggacgctgagaggaaggctgcgaacgttctgatggcccgtgtgagcagtcctcgcaggagacaccaccagctgtgggagcttggggcggggtgggtagtggtcactgcggtctgggagtgctcagatagcccgcagaacaaatcatgtcaccaagcttcaagccatggaggttccttccctctcacctgcatttttgcccgtctttatgagggtcttgaaaatcaaaatagtagttgcacagtatgtgtaggaaagacagtactggaacggcaaggtttctcagcttatcttcagcaacatatatactggattagggcaagagaaggaatcacccagcacttcaccagttggaaatctctggaaatttacatctatgtatttaaagttctgctaatgcaaatcttttctctggaaagaagcacagaggaggagttctgatgacccaggggttagggctgagacaaccggacgtttgtcacctcctttcccattgggtttttaggaaaacagtgtgaacctcccccttttaatttctggtgttatgaggaagaataaaggggataaaaggggctaagatggactcatgtttagctaagttctgacttgtatccagcatgctggagaccaaagctgccgccttactgctatttttaagtgccctcttttcagtcatttgcataattgcgtccatagagctgcatatgttgtgaataaattctcactcatttcaactttgaataatttgactgtcttgataattggttcctcccaaagactcttctgcaactcccattcatgcccaccaggcctcagactccctcttttccccgccctgcactattggagccctgggttttgtgggagtgctcagcaccgtgagtcttactgtttgatcggacagttagcaagatcagatcctttttgcttattttctatcactttggagggttttctgtagcaaaatcagtgaccaatgaagtaacttaaattcctattgaagaaaaaaaataataaaccacttgatttaaaaaaaaattgccatgtgttattttcctccacgtaagtgcacttgaattctaaatttaacctacatgcaagtgaaggtacaattcgtgcattgtaatggaatttggttggctgtggactctgatttgcatgatgggaaataatggtatttagaatgcagaagtgagtgaatgggaagtaaggcgaatgctccaaaagctgccgtacccctccaggacgagggtgtagtctattgcctagatgtctccaggttttaacctctgggtgaatgtcaaaccatacccctgaaaccgtttctgtcaacctttaaagtcttcagcatccccctctggtgccttccttccccagacacacacattgagcaatgccatggtaactgctcgctctgataatgagtggtctcagtgaaatacagttttagtgttgatgctgacgatgaaaaaatgtgcttgcatgttattaattgattcaacaagagtttgttgtttgctttgtatcaagcagtgtgctgggcactggggaaacaaaggtgagcaagatagacactatccttgtattgatggagcttgtgtgctgtcattcattcattcgtttacattcactcattcaacgaatagagatgaagccctattatgtgccaagttccattctaagcattggtgttaatcaaggacataacatcatattcctgtccttgtgctaatattctcatggtggaggctgacattaagcaacaaataaatgtgtggttacaagaagtgggaaatgccgtggaagaaaaggtaggatgagaagatgaaggtgttgcatggtgttggactatgaagcctctctgaggaggagatgtttacagaaattgaccaaatttctcctagtcttgatctaactttatcagggcctgagcctgagctaatttctttgtctgcctttttttttttttttgaatggggtctctctctgtcttgcaggctgctgtatattcacatgatcaaggctcactgcagacttgaactccagccttgaactcctgggctccagcaatccttccgcctcagcctcctgagtagctgggactacaggcacatgctactgtgcccagctaattttttacttttttgtagagatggagtcttgctatcttacccaggctggtctcatctgtcttaaaggtctgtctgcacaacttcccagttccaagtcttctcctcaaattctcttcttttaaaaacatttttgtagttttttaattgttttatttaatagaaatggagtcttattgtcacccaggctgtgtgaggaaaacagtgtaaatctctcccttttaatttctggtgttgtgaggaagaatatagggaataaaaaaaggcgagtgcaatgtgtgaccacagctcattgtagccttgaattcctggactcagcaatcctcccgtctcagcctcctgagtagctgggactgcaggcgagtgccaccatgcccaactatacatctatatctatatctttatctatatctatatcatctatatctatatctgtatctatatgtatatcatctatatctatatctatgtctatatctatagatatatagcaggctcttgctatattgctcaggctggtcttgaactcctggcttcaaatgatcctccagccttgactcgggaagtagatgggactacgggtgctagccgccgcacctggctggaattcccttctgctgttccgtgaccccgtttgcatgtggggtactcagcttcgtaattatgaagctttgggctcatcacagtgatccagggtttttagaaaagtgcctcctttgcaaaatggattaaatcccagaaattgacttcgagccaaggatggtgattgttggcaatgcttctcaactttgaacatgcttgttaacacagagatcacggggtcccttccccagacgctctagttaagtaggtctgggccgagggctgctgctggagtggtgtccactctgagtagctgtggtgtgggggagccgccggtggtctttttgctctggaggagcctgtgatggtagcaaattacaaaacacacacccctgtgttcattgaccccagggtttctccaccactgggcaagaggaggacttttgggaaacaggagctatttcttacattattttgcctgtaggacccatggtgcacaaaggagcgggtgaagaaaacctcagctgacccttcaaaggttctactggggaccaggaaggaagttgagagaaactcattttcaaagggcctctgtctgactgaggaaaacattccaacttgaaacttccatgcctaacctcattttaacgtgaccagtgctcacaacttccaatctggtagctgaatatgggcccgtggaatgggtttctggatagacctgctttttagagagagtcaattttcttagaaccaggttatgagccatcaaggttttgaagcttacagggacgatttctaccctttagaacaaactaaagcaaacaaaagctctcatagaaggcacaggctgcaagccaggcactagggtagatgcaaagacagaagtcttggtaaagtttccaaagtgttgccttttatgcaggacatgagcaagacagtgataaacagaacacaaatgtggccttccagcagctcttggagtggtggcagaggcagccatggaaacaaactggggagagtgagtccacagggaggtggactgaacactgtgggcagagtcagggtgactcatcctgccaggggtgccaagggagagagcttcacggggatgtgatgtcggctttaagtctggaaggatgagttctggggggagaaaaaagaggcccaagaggggtggggcccatcgggtacaggcgacttggcagcaaggaagagaaagtgtggagtgtggcatgtctgaggggggcaaagtggtttcttactggggtgaggagagcttggtggggagccaggctggtgagatgagtggggattcttcctttgccaggccagtactgaggttctcagcgctcactacctgtcggcggcggcagggggcctccatgggtacagaagctccactcccctcaacgggctctgctccagtgggtctcaggtgagttctgtgcacctgagcttcctaaagtgcccccaaggattccaacatagaccacgcttgagagccactgctcagatgaaagcatgtggaaagtggggaacacacaggtttttaaacctgagagtgacaaggtcagatgtatatttcggaaatatcagtctggtgataggatagacaacagggctgggggtgttgagggaagttttggaggaaggatagggactcacaggcaagttgagtgctattgtgatagttcaggcaagcggtcataacttccttggcctgtggcagaaatggtggagaaggggaggagggtctagattagtgagatatccaggaagaaggaatggtgggctttgaggaggatgggtggtacaggcaagagatgggtcgtttcatgtcagagcttagagctggttgttcctgacagtggcttcctctgggaatagggtcccagagtttatgtttgtcaaatgagatcaaaagctctgcgtttaaaatttgaattctcagggatttaaagatgattaaagccaggaaatgctgaaggagctgaggagaaagatagaaaatgcctccagaaattgtgattgaggaaggaaaaaggccaggtgtggtgtgtgaggagatgtggacaggggacatgcagatgaagggatggcatggcagaaggaaaaacaagtataacagcgagaaactcttggtgaaatttagccagttgatggaaaaggccctccactaatcccagctacgccggaggctgaggcaggagaatgcttgaacccaggaggcagaggttgcagtgagccgagattgagccattgcactccagcctgggcaacaagagcgaagctccgtctcaaaaaaaaaaaaaaaaaaaaagaaattccaagtcattacctcaagcgcttcgctagggtggtggaggggatcaggagggagttcatgtcaatacggagctgatcaatacggttgggaccgcagcttagtgcaagaggtttgctatattcagcctggccaggagatggcagtgttgtcctgtcgggagcctctcatttcagcgccacttctctcttctataaaggggagttctgggggctaggtccccacttttctcttttcctgggtgatgctatctggagagtcagtcggtgaggcccagcttaacattgggcctgcacttggtggtttcttaggcagcgttcttgctggacaaatgcgcaaaaaataactgggaacaaccttgaggagattgcttggtgagattggactctatccccagacccggcgcactgggctgctggggaggaaaggcggatagaggttgtcagcctgatgaaaggtgaaggggggcacccctgggagagatttcaggcagctcctaatttgcaaatgaattcacttctccaattccttctgtcagttggctgtttctgtgggtgaaattatttgagttccaattataatgttatataaagaaggtaggttctcaggttagcccataaaactctgtttactctacaatatagatgagttgcagtgtatgtataatgaaaaataggaaacaacagtattgcggtactgtaatttaaataaaagaaagaaacaaaatggaatggaaacagttctttattttggtgagtgaagaaaattaggttgaattagagaaggagaaggaggcagatgaggcttgctgtgggacatataaaggaggcatttgggcactttaaaggcttatgggaagacccttgattgtgttctgtaagtttccaactcaagggaggggcgtctacaagttcaacagtctttgaggagccaagatcagattggcctggatctcgatgcctggtgtgcagaaggaacactggggtaggagtctgaagacttgggtttctattccagttttgggtaaactggcttaccttctctgggcctcattttcttcatttataaagtgagaatcaagtgaaataatgaaagtggtttttatgtacgaaggcactctggaatggtaaaatagtgggcttggatcttcagtcttcatattttcatttaaaactttttctttttttcttttttttcttttgatagagatgtctctttagcagctctaaaacatatttgctatgaatagccaccaacaggattattatgggttgcaaatggaagaaagagaaagggaagagtaaaagagaaagggaagagtaaaagagaaaggttcataaaggttagtgagaatctgtgtacactgcagaaacagtttcctctggagatgacattgactgagtctgtagtggaagtcaggagcagaggaagcgtggagtgcgcactagctctctatggaagacgggagcaggggacgcgtggagcgtgcactagtcctccatggaagtcaggagcagagaatgcctggaatgcgcactatccttccatagaagacaggagcagaggacgccggagtgcgcactagccctccgtggaagacgggagcagaggacatcggagtgcgcactagcagtccatggaagtcaggagcagagaatgcctggagggcgcactagccctccatagaagacaggagcagaggacgtcggagtgcgcactagccctccatggaagacgggagcagaggacggtggagtgcgcaccagtcctccgtggtagacaggagcagagaatgcctggagtgtgtactagccctccatggtagatgggaggagagaatgccaggagtgtgcactagccctccatagaagatgggagcagaggacgcgtggagtgcgcactagccctccttggaagtcgggagcagaggacgccgcagtgcgcactagccctccatggaagacaggcgcagaggacgccggagtgcgcactagcccttcatggaagacgggagcagaggatgcgtggagtgcgcaccagccctccatggaagtcaggagcaaaggatgtgtggagtgcgtactagccctccatggcagcatttcccaaatggtggcccctgaatctttgttcctccagatgtgctaaaagaaaaagaggcttgtggttaaataaatttgggaaaattttaaggggagttaaaccaaattctttattacagcacctgctagaaactttaatgtgataaatgcgttgcagatcccaagggggtgaagtgggaaagttatactatgcagtgtttgcaaacttatttgaccgtacacagttcttttgttgttttgatagtatttctcaaggtgtggttcagggaccacctgcattgacctggtgtttattagagcaggttgtctggcatcaccctagacttaataatcagccagaagggcagggagagacagggaatttgcatttttaagaaacacctcagtgtttatttcccccaatcaacacatttatttagcatatagtatgtgccaggctccatgctaggtgttgaagatatactagtgaataagacagttctaattctaatctcataaagctaattctaatgggggtcaaaataggggtggggtgctgggaatagaagcaacacacaattgcaatgtggtctagtcttactgcaatgggcaagacttgtgtggttagggaagctttactgtagtgaggctatatatagaacacttcaccaaaatatgtttgtaacaacagttgagacctatgatttatggaaatcccccatatgtcacatgagcacggcattccggaccctgacagatttgtgaatttcacataaaacccggtgactcttttgcacatttaatttgagaacaggtgaactagctagatggatgttctccaggaaacacttctaaggtgaaaaagatgttgactcacgctttctcctgatctggccaccaggtggcactgacaagctggggcgacttcgttgtgggcagaggcgggacagataattaggcagccttgcctaatctgcaaatctgcagaccttaatccatggagtattggtaatcctgtagatagtgcagtatgtggtgaaattagggaacacatcacaccatggggaatagaaaatgctaattattttcaatccctatctcattcgatttgcctgcatcatttgactctatggaccatcactttcttcttggaaatttcttttcctttggttcctaggacacagctctctcacggttttccttcaacccttaataataataagtaacatttattgggcacttaatataagccacgtcctgtgctaaatgctttgtacacacgatcatttaatgctccctatgaggtagctactctcattagctttatttagcaggtaagtcttacagagagattaagccatgggtccaaattacataactagtgagagtcggagttagcatcagggttgggacaaccctagtcatgagtcctagctcactgcacttatggcttccagagagccctgatggtttctgaatcgtccccatcatcctgtctgcttgcatcactactccagggtgcacttgcctttgtagactgtgcagctggggccctcctttctcagtttcttcctgtgcaagtctctagacacctcctaggcgatctcccccggcctgtcctgaagccagcctgggagcttccctctaaggaagcaatggccacactgtcttgtcatggtttgcttgtctgtgcccccctaccaggttctgagcccctctaggacaacttagtatcactggcacctagcgtgcttggcatatagtaaacagtcagaaatgttaatgggatgaacagcctcaaaagagggctggaggtacacagtcacagccattcctgaagaaatatagtgtgacattgcccacacaggtgtttgaaaacaaccctttgagtctaagacagaaagcgggttgaagggatttttttccagtccagtaaacctgtgactttgaattgggaaatactactaaggtcaacgggcaaggggccagtgcagagtgctgtgataaactgagaatgctaaggacgtgatggcattcattgtccaaatccatattataccccaaggccaggatggagccggggcaggtgcggctgcaggcattgagcactggcatcccctcaggggtgcagcagctgctcccctcccagatggtttctgagcatcagttcctcctctgcaccagaatgtttagcaatgtcctgggtggatgaacaaggagctgaatgaagagtctctgttctctggttgtcatgagtgtgtggtgatggggaagggagcccaggaatgaactcatctgaactacagacataacctgccttgggcgagataaggcaaagagtccacctgtgctctaggccttccttcttaagccctccttgaaatccagtcagcatggctgtttttcccaggtgtctgaccctgcccccaagatcatagacctatgctgtccaggatggcagccgctagccacgtgtagctactgagcacttgaatcgtggctggcatggccaagcgcagttgcccatgcctataatcccagcactttgggaggctggcgggtcacttgaggccaggagttcaagaccagcctggccagtatggtgaaaccccatctttactaaaatataaaaaaaattagctgggcatggtggcacatgcctgtcatcccagctactcaggtggctgaagcatgagaattacttgaactcgggaggtgtaagttgcagtgagccaagatcataccactgtattccagcctggatgacagagcaagactccatctcaaaaaaaaaaaaaaaaaaaaaagaaaaaagaaatatggcagacatagctgagctagtatacctttaattttatttcattgcaatgaatttaaatagtcacatgtggctattggtaccatattgaaccatattgaacagtgtacacacacttacacacacacatacacacagtttttgccctagtggctactatagaggtttttgatccctcctttcccaacaaacactggatttaactcaaaggtccattcttccttaggtttttgctatttccccccttttcctttaagaagccattgatggacctcattgatggaaagttctgtaagtgttgccaaggaacatcagtatatttttcctgtagctggcacctttgagggagtctggtctccaaggccatctgttttgcaagcaagggtgagacagccacattcctcatcctcagacctatgactctaccatggcgaaggcggtgaccagggagggctgggacatttgtgtcacagaaagagtccctgcattgatcatttctgagtgatgtctgagtgggggtaatacctaatgttaagaaagtaaccatctgactacatcaagacttttcattttcaaagtattttatttaaataaatttttcttttgtgtgtgtttgaattttacagaaaaaaatactgacaaatactatacagcttggaccctttatatttttcttggaaaggtggctgccatttttctacctttctccctccctgctccccccaagaaaaagaaacatggaatccattgagcaatggggaaaggagcaatggggaaaggcctcctctggctgccgtccggagcctggctaaagctgctcagaagtccaggcctaggggatgtctttctcgagcctgtgctggtctaggaagcctcttctttaggaatcatttttttgtcccccgtgaacttaccctccccagatgagtcaagcagtctctggtcctgaggtcccatgggttgccagtggcagttcagggacagaggctggaaggagtgaaaatggagaggaataaagggctggggctggtctggtgcaggcagaagagggaatcagagaagcataaaacatggagaaaaagatgagaag

SEQ ID NO: 834 - DNA, 4874 bp, Homo sapiens
atgttccgcttccctatggggctcctgcttggctctgtgctcctggtggcttcggccccagccactctggagcctcccggctgcagcaacaaggagcaacaggtcactgtcagccacacctacaagatcgatgtgcccaagtctgccttggttcaggttgacgctgaccctcagcccctcagtgacgatggggcttcgctcttggccctgggggaggccagggaggaacagaacatcatcttcaggcacaacatccgccttcagacgccacagaaggactgcgagttggcaggcagtgtccaggacctcctggcccgggtgaagaagctggaggaagagatggtggagatgaaggaacagtgtagtgcccagcgctgctgccagggagtcactgatctaagccgccactgcagcggccacgggaccttctccctggagacctgcagctgccactgcgaagagggcagggagggccccgcctgcgagcggctggcctgccccggggcgtgcagcggccacgggcgttgcgtggacgggcgctgcctgtgccatgagccctacgtgggtgccgactgcggctacccggcctgccctgagaactgcagcggacacggcgagtgcgtgcgcggcgtgtgccagtgccacgaagacttcatgtcggaggactgcagcgagaagcgctgtcccggcgactgcagcggccacggcttctgtgacacgggcgagtgctactgcgaggagggcttcacaggcctggactgtgcccaggtggtcaccccacagggcctgcagctgctcaagaacacggaggattctctgctggtgagctgggagccctccagccaggtggatcactacctcctcagctactaccccctggggaaggagctctctgggaagcagatccaagtgcccaaggagcagcacagctatgagattcttggtttgctgcctggaaccaagtacatagtcaccctgcgtaacgtcaagaatgaagtttctagcagcccacagcatctacttgccaccacagaccttgctgtgcttggcactgcctgggtgacagatgagactgagaactcccttgacgtggagtgggaaaacccctcaactgaggtggactactacaagctgcgatatggccccatgacaggacaggaggtagctgaggtcactgtgcccaagagcagtgaccccaagagccgatatgacatcactggtctgcacccggggactgagtataagatcacggtggtgcccatgagaggagagctggagggcaagccgatcctcctgaatggcaggacagaaattgacagtccaaccaatgttgtcactgatcgagtgactgaagacacagcaactgtctcctgggacccagtgcaggctgtcatagacaagtatgtagtgcgctacacttctgctgatggggacaccaaggaaatggcagtgcacaaggatgagagcagcactgtcctgacgggcctgaagccaggagaggcatacaaggtctacgtgtgggctgaaaggggcaaccaggggagcaagaaagctgacaccaatgccctcacagaaattgacagcccagcaaacctggtgactgaccgggtgactgagaataccgccaccatctcctgggacccggtacaggccaccattgacaagtacgtggtgcgctacacctctgctgacgaccaagagaccagagaggttctggtggggaaggagcagagcagcactgtcctgacaggcctgaggccaggtgtggagtacacagtgcatgtctgggcccagaagggggaccgagagagcaagaaggctgacaccaacgccccgacagatattgacagccccaaaaacctggtgactgaccgggtgacagagaatatggccacggtctcctgggacccggtgcaggccgccattgacaagtacgtggtgcgctacacctctgctggtggagagaccagggaggttccggtggggaaggagcagagcagcacagtcctgacaggcctgagaccgggtatggagtacatggtgcacgtgtgggcccagaagggggaccaggagagcaagaaggccgacaccaaggcccagacagacattgacagcccccaaaacctggtgaccgaccgggtgacagagaatatggccactgtctcctgggacccggtgcgggccaccattgacaggtatgtggtgcgctacacctctgccaaggacggagagaccagggaggttccggtggggaaggagcagagtagcactgtcctgacgggcctgaggccgggtgtggagtacacggtgcacgtgtgggcccagaagggggcccaggagagcaagaaggctgacaccaaggcccagacagacattgacagcccccaaaacctggtcactgactgggtgacagagaatacagccactgtctcctgggacccggtgcaggccaccattgacaggtatgtggtgcactacacgtctgccaacggagagaccagggaggttccagtggggaaggagcagagcagcactgtcctgacgggcctgaggccgggcatggagtacacggtgcacgtgtgggcccagaaggggaaccaggagagcaagaaggctgacaccaaggcccagacagaaattgacggccccaaaaacctagtgactgactgggtgacggagaatatggccactgtctcctgggacccggttcaggccaccattgacaagtacatggtgcgctacacctctgctgacggagagaccagggaggttctggtggggaaggagcacagcagcactgtcctgatgggcctgagaccaggcatggagtacatggtgcacgtgtgggcccagaagggggcccaggagagcaagaaggctgacaccaaggcccagacagaactcgaccctcccagaaaccttcgtccatctgctgtaacgcagtctggtggcatattgacctggacgcccccctctgctcagatccacggctacattctgacttaccagttcccagatggcacagttaaggagatgcagctgggacgggaagaccagaggtttgcgttgcaaggccttgagcaaggcgccacctaccctgtctcccttgttgcctttaagggtggtcgccggagcagaaatgtatccaccaccctctccacagttggtgcccgtttcccacacccttcggactgcagtcaggttcagcagaacagcaatgccgccagtggtctgtacaccatctacctgcatggcgatgccagccggcccctgcaggtgtactgtgacatggaaacggacggaggtggctggattgtcttccagaggcggaacactgggcagctggatttcttcaagcgatggaggagctatgtggaaggctttggggaccccatgaaggagttctggcttggacttgacaagctacacaacctcaccaccggcactccagcgcggtatgaggtgagagtggatttacagactgccaatgaatctgcctatgctatatatgatttcttccaagtggcctccagcaaggagcggtataagctgacagttgggaaatacagaggcacggcaggggatgctcttacttaccacaatggatggaagtttacaacttttgacagagacaacgatatcgcactcagcaactgtgccctgacacatcatggtggctggtggtataagaactgccacttggccaaccctaatggcagatatggggagaccaagcacagtgagggggtgaactgggagccttggaaaggacatgaattctccattccttacgtggagttgaaaatccgccctcatggctacagcagggagcctgtcctgggcagaaagaagcggacgctgagaggaaggctgcgaacgttctgatggcccgtgtgagcagtcctcgcaggagacaccaccagctgtgggagcttggggcggggtgggtagtggtcactgcggtctgggagtgctcagatagcccgcagaacaaatcatgtcaccaagcttcaagccatggaggttccttccctctcacctgcatttttgcccgtctttatgagggtcttgaaaatcaaaatagtagttgcacagtatgtgtaggaaagacagtactggaacggcaaggtttctcagcttatcttcagcaacatatatactggattagggcaagagaaggaatcacccagcacttcaccagttggaaatctctggaaatttacatctatgtatttaaagttctgctaatgcaaatcttttctctggaaagaagcacagaggaggagttctgatgacccaggggttagggctgagacaaccggacgtttgtcacctcctttcccattgggtttttaggaaaacagtgtgaacctcccccttttaatttctggtgttatgaggaagaataaaggggataaaaggggctaagatggactcatgtttagctaagttctgacttgtatccagcatgctggagaccaaagctgccgccttactgctatttttaagtgccctcttttcagtcatttgcataattgcgtccatagagctgcatatgttgtgaataaattctcactcatttcaactttgaataatttgactgtcttgataattggttcctcccaaagactcttctgcaactcccattcatgcccaccaggcctcagactccctcttttccccgccctgcactattggagccctgggttttgtgggagtgctcagcaccgtgagtcttactgtttgatcggacagttagcaagatcagatcctttttgcttattttctatcactttggagggttttctgtagcaaaatcagtgaccaatgaagtaacttaaattcctattgaagaaaaaaaataataaaccact

SEQ ID NO: 835 - protein, 1290 aa, Homo sapiens
MFRFPMGLLLGSVLLVASAPATLEPPGCSNKEQQVTVSHTYKIDVPKSALVQVDADPQPLSDDGASLLALGEAREEQNIIFRHNIRLQTPQKDCELAGSVQDLLARVKKLEEEMVEMKEQCSAQRCCQGVTDLSRHCSGHGTFSLETCSCHCEEGREGPACERLACPGACSGHGRCVDGRCLCHEPYVGADCGYPACPENCSGHGECVRGVCQCHEDFMSEDCSEKRCPGDCSGHGFCDTGECYCEEGFTGLDCAQVVTPQGLQLLKNTEDSLLVSWEPSSQVDHYLLSYYPLGKELSGKQIQVPKEQHSYEILGLLPGTKYIVTLRNVKNEVSSSPQHLLATTDLAVLGTAWVTDETENSLDVEWENPSTEVDYYKLRYGPMTGQEVAEVTVPKSSDPKSRYDITGLHPGTEYKITVVPMRGELEGKPILLNGRTEIDSPTNVVTDRVTEDTATVSWDPVQAVIDKYVVRYTSADGDTKEMAVHKDESSTVLTGLKPGEAYKVYVWAERGNQGSKKADTNALTEIDSPANLVTDRVTENTATISWDPVQATIDKYVVRYTSADDQETREVLVGKEQSSTVLTGLRPGVEYTVHVWAQKGDRESKKADTNAPTDIDSPKNLVTDRVTENMATVSWDPVQAAIDKYVVRYTSAGGETREVPVGKEQSSTVLTGLRPGMEYMVHVWAQKGDQESKKADTKAQTDIDSPQNLVTDRVTENMATVSWDPVRATIDRYVVRYTSAKDGETREVPVGKEQSSTVLTGLRPGVEYTVHVWAQKGAQESKKADTKAQTDIDSPQNLVTDWVTENTATVSWDPVQATIDRYVVHYTSANGETREVPVGKEQSSTVLTGLRPGMEYTVHVWAQKGNQESKKADTKAQTEIDGPKNLVTDWVTENMATVSWDPVQATIDKYMVRYTSADGETREVLVGKEHSSTVLMGLRPGMEYMVHVWAQKGAQESKKADTKAQTELDPPRNLRPSAVTQSGGILTWTPPSAQIHGYILTYQFPDGTVKEMQLGREDQRFALQGLEQGATYPVSLVAFKGGRRSRNVSTTLSTVGARFPHPSDCSQVQQNSNAASGTIYLHGDASRPLQVYCDMDGGGWIVFQRRNTGQLDFFKRWRSYVEGFGDPMKEFWLGLDKLHNLTTGTPARYEVRVDLQTANESAYAIYDFFQVASSKERYKLTVGKYRGTAGDALTYHNGWKFTTFDRDNDIALSNCALTHHGGWWYKNCHLANPNGRYGETKHSEGVNWEPWKGHEFSIPYVELKIRPHGYSREPVLGRKKRTLRGRLRTF

SEQ ID NO: 836 - DNA, 27901 bp, Mus musculus
tggggtgaaaaattagttgggagactagaaggcccaggatggccttaattaatgtctcctttcttcctagctctccgctcacattccctcagactgtagtggcctggctccaggtcacagatgtagctgtcccaggcctgctactacctcagtttccccactgaagtacagggactgtgtgggttttcttctcttttccctgatattggttctcctggcttcctcgtgggtctctcttttcagtgtacttggtgtagcttctaaaagttcttttccttggactctcctgccgtccgccatctttaatcccctcccccatggtgttcttgtcctttttttgattattcaaaatacattgtttagaattgggaaaagagaaagataaaggcactgagaagcggcctcctggtctcctgcatcctaacccattatctctttgctttccttgcttctctggatccagaaaggtctgcattggattcccatccaatgggacacacaggtcggggtgttaaggatattgaaaaagaaaagatttttgtgtctgctgtcttgggctcagtggtgcacctgcctttcctggggcctgagtcatggactggtgcggtgcacacttgcctaaaagtcaggtcccagtggtgctactggccacttggatgaccttgggcaggctgtcacctattttgtctcccgggtgacaaggggtgccagaaagcctgtgagatctcctttcacctctggcgctccccaaactctgggctacttcctcttactcatgcctagctcaggggagcagtagcctgcagttcccctgggctgagaggagacaagggggcagttgttcctgcccagccttgttagtaggtacaggtgtgtctatttcaattaatgtgagtataggaaatgagtctgaaccctttagctcttggcatagaaacaaaggaaggcctgtttggttttggttttgttttattagcaaagatgacctctatattttacacagagccaccatggaggtgggcagggtctgggtatccttttggactagggatcctggcatctcttgggtggtattcagggaacatataacaggtgagcctgtctttggagatcttttggactgtggcgatatgaggtgtcagggaggagagggttaatggggcttgctgagtttgggggcaggggtcacagctgggccctgcagggttcctgtttgcctttgattccatctgtgtggggaaggaatggtcccccagccccctgaggtaggtttgctttggctgaggatctgacccagccgctggcccagagcttccccaccctcccattcctcctatcaaggggcagcctggcctggcccctagcctcctccttcctgcctgcctccttcttcccttaccatgcccttcctcctcagccagcatcgagttccgtttttctgcttgtcccctttggcattctgtatgcccaacaaggacagggcgccctgtaaacatctggcacgccgagccatggcctctgtcctatgtaacgcacttccagagttctagggaggttgacctcctctttgcctcagtttctcttagagtccaggatcttatccctagaggaatatggcgtaatcagcagtgtgtgctccttgtgatgctatcgagccactgagacattcagtctgtacttgttgagaccttactgtatgccccattctgggccagtactggaaagaccaccataaccccgagtcacggttcccacacttacagtccttttgcttcgcaccccagcctccaaacccctccaccccattctttgaccctacttccccagagtgggtactgagcctttgagatttctccatttccttaatcttcctgcaacttctccactgactggctaagtgaaggattctcatcctagctttaagtttaggtgccaggcctggaccttaccccaaggttcccactagacgtggcatctgtccgtaccctgacattggatcctccagactccgaaactaaagacgacgcatgttaatttagttctcgtaccaactctgctttacagatagggaaactgaggcacccaatcaagtgggggatctgggactcagacctagtctatttggctctaggggctgcaatggtaacaagaaagagcacagatgataaaggggagggaaagagaacaacagcgctctgtgagctaggcgctaatgcctgctgattgcacatggttagactagaaggtgatatcagctccaagatgagagagatgatgctcagccggaagaatcaagaaggtcttcacggaggaggtggccttttaattgagtcttgatagataggagagatctggctccgtgagacggaaccctgtaggttcgggacatcaggggctgcagtagcatccagagtatagaggagaatgtgaagtcaatctgggaagtggatacagagagcctcgaatgtcagactaagtgttatcctaaatgccagcattctgttaaaaaaaaaaaaagaagaagaaggaaaataaaaacctgtgatgctaaaagtcacctggatacgtgttaaaaatacagaacagtggggccaggctcaaagattctgattcatgagggcgggggtggggagtgggagtctgtatttttaccaccgagaaagtttgagaaatattgctataaacaatatggagacatttaaagtttctgaagaaagaaatcatctcattcaaattgtaccctgggtaagactcctttgattgaaggggggggggtgtgtgcgcacgcaagcgcatgggtgtgaggtgtggggctggaaggaagagataggagctatcagggagagggtgtggcaggagaggaggtgggggggaacagcagaggtgagcattcaggactccgtagctggttgcttgccagggcaggggaggaaagacttgtggagtgggggtgttgcgcagctctgactgttatgaagttgggaaacaagctatcacatccctgcggtgggttgtgaggctgaggtgttgtgtgtggtcaggctgcaggaggggcttcttgaatagatgagacaggactggacctccgcagggagcatgggctgtggaagtcacctgcatagagatgaccatggaggcagaggtcactaaggtgggggaatctggaggacaaatggcaagagtcttaggaagaaatgtgttcaatacttaagccaaagatgagcctagaccagcggctctcaacctgtgggtcataacccctgtgtggctagaaagaccttttcatggaagtcacacatcagctatcctgcatatcggagatttacattctgtctcatgacactagcgactttacagttgcgaagtagcaaggggcataattttatggttgggggtcaccacagcatgaggaattgtattaaagggttgcaacattaggaaggttgagaacaactggtctagaagatggtgaggtagagaagccagaaagattgagagagctagatcaagctaaggacctagagttgagagaggaactgttataagagcataagaaagaactctaaaagccaagttccagttgacaaagggaaatgaggctggttacttctttttttttttttttttttttttttttacctcagacacctctgaggtgactgttgtgacctctaaggaagccatcttcatggcaggtcaaacctggaaacaacaatctcccttcccccccccccccccccccattccacactaacagggcatgtggtgaggaagctggaggctgaagcaggccaccttctttcaagaagattgctttaggaaatagaaaggaaagaagacagtgggtaactgaggagggggtgtgagggatgcggggctagggtcctgtgtggaggactctcttctcctgttcgctgggcctaccccactgcccatgtgccacagcgctcaccataacttatcttcctgacaatgaccaggaaacagtgaggtcagtgcggccatggctcccattatagaaataatggaactgaagttagggacagtgccccctggctgtgagaaccaggtctgcccaaagccttactgtctagccccgacataccagccccacctactcagaccatacattttatgtttgttttggttggccccttcatcccaagaacatcaagaggtagggtcctctgtgccaacacacagtgccaatgtagagtggctggttctccttcttggtgttccctgtcaccatggctggcagctggtcacacctccatacccatgtcatgccccagacaccagttttgtgtccacaaatggagtcagaatgcctagaaagtaaatctcagactgaccactaattggacagaaggtttcctgaacacatttacccagtcactaactctgcgtgcagggcaaaaatgcttaaggaacatagattattactttctgccctcgatctccaaggtcctagcctttggggtgcaatttctctttcactggatgtggtctccagcaccttccctctttggagcacagagcctgcccttgctaggttgcccaggaagcggtgtggcttgatttttgagcgacagatgtttgagttctgaaataggaaactttcatgtgtgggtggaagtggtcagggcgagatagaatcagagatcagaggaaacagaagtgtccaccatggaggccatggggtaaccagagagaaaagactgatttcctctactcactccctgccctcacacacacacacacacacacacacacacacacacacacacacagaggaggaggaagaagaggaggaggaggaagaggaggaagaggaggaataattagaattggcagtggccttgagaagctcagtcaaaataagaaggcagattgaaacaagctctgtatatacagttcaatgtggaaaatgccatccgagggccaacggcagatgttgtgagtgcgtgtagaaatgtgtgtgcgcatgcgtgcgtgtgtgcgtgtgtgtgtgtgtgtgcgcgtgtgcatgtgtgtatacgtgtgtgtgtgtgtgtgtctgggtattgaggattgtcttaccatcgggacccagctcccactcgctcccatggccagcactctcacccccactgctccatctgtttctttgtttttgcagtttttatttctggctttgtttttccgttactttcctaatagagagcctttggaaaaattccatccttgtttcagttggaccaagcaaaaagggaattgtccactcttcagccagaatagccaaggggtactggcctccttcggagtccaggtggacaagtggacaggcaaggactgatgggaaagaggccgaggaagacgctcagctgagaccagggaggtctaagcaggagcatcagagcttgggtgagctggctgggcaggctgtgcatcccacaccaccccttgcacctccctgccttctgttctggttagaggggagaacagagaagcccttccatgctggggtgctttggagctgggtctcaaagctctttcctcgtctgggaggctgtgaggagctgagaccccagagtcagacgtctttggcgtgtgtacatgaaacctgttcttctctctttccctcaaagtcccagcacacagctctcattgtttcctcttatccgggacctctagcactgcactggcttattcaagaaatacttatagaacacctactgtgtgctacatacaccataccacatatatcacatacactacacacacacatacacatataccacatcacacaccacacatacatcacacacacacacacacacacacagagacaccacattacacaccgcacatacatctcacacacacacatacatataccacaccacaccacaaccatacatacatcacacacacaccccaacccctttacactatatatacacacacaccgcacgcatattcacacacactgaatgtatgcaggtcaccatacaggagaggagacatgttcaggacatttaggctcatttgcctgtgagcgttcctgtttatttgctatgcaaacttgggtaaattgcacaaggtctctgctcccgcttcctggctgtaacatggagggaggtaagcacagctcttagcttccaaggctgtggcgaggactgaatgagcaagcctagtgtgtacacagcgcccaacacaaagccgcctttcagtcagcccagcgtttgttcctcacctcactcagctggaggcagtcaaacccgtaaatgacctgttcttcaaatttgcctcttgctcaacctggtgactcagaagcagtcacctggtgctaaccacctcttgcccccgaggctcaactaacacccagtccgcagagctgtctactggactgctatttcctgacttcattgaggcctactctgctcgggatctcacagagagtgagagtgaggcctgcttttgctctttgacaccctccagttgggattctaaaccagcgggtccctctcagctggctggggacagagcacaagtccagggagcctgggggggtggggagtgggtggtgggggtggtgggtggaacccagatacctacaccatagggctaatgaactcaggccttggcagggtagaaagctgagggggattccagctcagagggatccatgagtagcattccaaagtgggcagcagctggcattcactctgggagaagcaatggctaggcccactcagtgggtcagaaccaggtcatgccaaggcccaagtagtatagtggctcctctattcttgaacaactgtgctgcccgcttggcactgggcttgagaactagaagtgtgagctctgtcagggcaagaggagggaccaggggacacacacacacacacacacacacacacacacacagagagggagagagagagagggagagggagagagagagagagagagagagagagagagtataaggctttacacaacttgctcaggggagaaagaagtggtggagtgtgcttggggggccactttgtgggaatgtgtctgggtgtgtttgatgcttgcatgtttgtgcttgcttacacacctgcttcatcccctgcgtgaagttgtggtccaggtgatgggtagggtttttctcttcctttgactctgaccctttctgtaaccgctcaacaattcagcagagagaacttccccttcggttcatcagttcatccaggtgaaggctttgtaaacacacacagacacaagacattcttgtgtgggatcttaggctccctccgagctggactttacacatactaaggaggcaggggataccataccattatgtgtgtgtttgtgtcgttttcttattagcttagtggctggtgtgcttgtcagtgtgtctctatagctgtgtgtgtgtgtgtgtgtgtgtgtgtgtgctgggcttatatttcttttctctttctttctgtgatatttgctttcaccacgcaacaggctagaggatcctagctcaaatctgaatttggactccaagaaatccaacactggacagcgagtctaacacgccttaggtcctccatgcctcggtttctatagagatgagaagtgctaacctcacaggttctgggaaaacgaaatcagctcacgttacagagcctgcacagggcagaacacgtcacctcaacagtcttgtctttgaacatgcttctctctgaggggcattgttctcttgctgtgactatagcatatgacatttcagccagattataactgtttcagggaaggccttgggtcttaattacctctaacgatactcatgacaccttactgtcatctagatgcttcatacacatgccatctggaggctgaatgttgttaaataaccacatggaatgagactggtgactgaagtctgcccacatgtggcagtacgtggaactgtgggtggggatctggtttgatggtcacaacagtgtccacgtctctacagtctcaggcttcctctcaatccatgctttagtctaatcttaagtctgcctggaaaggtctcttcctttttgcctcactccaccccagaacgccagtttccatactgcataagtctgtgtgagtgtggggtgtcctccagtctttgacgttgatctggccctcctttgccgcatgtgcgtgtgtttgagcattgccccgctgggtgtgtgcgcaacacctttctgtgtgaagccccttggtttcagtggggagccatgtgcctgcatgtggtgagcctcgtgcctggcgtttactcccctcccccaactttccaagttacataagcatcttaggagtgagacagtcctggactttgggctccctctgctggccactgctggactgcacagttttgggaggggtgtgtaaacgttctcctagcccagcccctaacccctgtgtactggcacgggagtccctttgtcccaagctacaaggtaatctcctggaagagagctcctcctactccatcccatatgcttataccgagtgctgactgttaacttgtttattcaaaacacgcaggatatccctgagagttggggaccttgaaagccttgctgactagggcactactaaaatccagtacaaggtctggcccgctcagtaccctgcaacatgaatgagttttcgccctgaacagagtgaacagtggagtataagaaaagatgggaaccgtcagacttgaggttttgtggatttgttttgttttgctcttttgtttgttttgagacaggatatatgtagttttggctggcctggaagtcacagagatccatctgcctctgcctcctgcgtgctagggtgtgcacaccagacctgagctttaaagtaacactttagttaccttaaaatctgtgtggccttgggcaagacacataactattttaaaaggccaggtctctcttgtgttaaatgactttgcttgtaaaataacctgtaaagtttagaaaggatatcttcaggtggtggtggtgttattgtgaaaccatcccataaatggctatgatgatgataatcatgatgttgtgatggtgacagtgatgatgatgatgaccgactttcaaaccggtaccagaaagtcattcaatccactcaacctccagctaaagggagaatgctttctcccaaagtctccctgtagcttgcagttttcacatggctcaacatggcttctagagaaacagtgtgaagaaaccaggcttgggatatatccaggtgacaaggagcaggtcccttagcctcttgctaggcagtcttgggcgaccagggttggagttctgacttccctatagattccctatcagtgtttctctgtggttgctgaatgtggcttccactggcagccccacgaatacgtcctctgagaagaggaagtcaccgctggcccggatctcttttcctgtctgtgcctcagttttcgcaataggaagcagtaagcgagggagcaggggtgaaggggacaagtagggaatggaggtgaagatctagacgtgttctaggccacttccccctaatggtcacttccgcgccctggttttgcaggctgagccgccccttcttcccatcctggccccaccctactctccgcctttttcacagttggagacatggctttgggaagaggtttctcttcctttttcctacctccaggctagctccaccttccccagcaaagaggtgtgttacgtcctctcgttggagactccaattggtagaaagcagtttaacgcaaaaacaaaacacccccatagttaccgtgtgcatgaaacgtatgtgcatgatctcagctaataatcgccgtaactcctcgagtgtttacaatctctgttccgtacgtggcgggagggggggggggaagtgagcttgaaagcattgagctgaacatggatcttccagctaggaagtctggaccgctaacccacttccctttcgctttgcattctgaccgggtattaaaacagatttccagcgatcttccaggactctgaagcccctttgggtccgcttcacgtccaggaaaccgtgggtcaggccatgcctacataaatcagcagggtttgctgccaagactcagtggcccacatcacccaattggattctgagtgcgtaaccacagtcaccccatcatgcatccccagaggccctgcaagcaccccattctccctggaaggctggcaggtgcagggcggggtgccctctgagcgaggaaatgggggtagaggagcccaggtgccgccagttcgcccagcctgaggccagaggcggagccaccatcagggtcgaagtctggcccaggcgacggcctggggcggggcgaggcgggggcggggccgggcagcggggcgcggctgggactggtctcccgagctgcggagggcgggaagagcggagggaggaggggaagaagggtggagggcggggagttggcggctcccgctcggctgggctctgcgcacccacgcttcactgctccgctttctgccccccacctgggcatgcgccccccgcggccctggccccccagagcctacgccgcccccaggagtctccccagagccgcctacgcagaatgggcgtccctagccccacgccgctgagttcgctcctgctgctgctgctaatacttggtaagccaggtggtggtcgccgcgtccctgtcccggccgggtaggtgcctaacaccgtgcagcccaccagcccaccttcctagcatttcagagctggttgcatccctacttctccaacagacgtgcctccactgtctctgggctcggcgtctcgcttccttttgcgcctgtctgcccaatcagttatggggagggtggtggtgtcctcgctctaggttcctagctggggcatatgggcgacctactgaggtatcccctgagacaccatcgggcctccggaggcaggcaccacttctcatcggttacacccagcgtctggggtcgttgctaccaaataccgtgacaaccttctgccccactctcggctcaaggcctggttttgggtgtttgctctgcgtgggcagtgcctggcggtcttcataattgcccagagttggctggaggcccaggggctgattctgaccacgatctctgaaaaaagtctccccaacacccccacctcccaatataacatgtcaccatctgaggcttcttccctcacgtgtctccaccctgggccagttccctctttgcccttccacgctcccagatatttgcctggttgtcagactcagttggtcccaacatccctgcctcaggagaaactaggctccatggaaactgaacctgggatctctaagcacccagtgtctgtcctggtgggtgtttatgatggtgtgttttctgggccaaccttgcgtcatgtctggtgtgtgtgtgtgagtgtgagtgtgtgtgtgttgaggcctgtggaggttgctaacattaccatgtttggggtctgacttggagggctccctgtaggaggtggtctgggaaagatatggcatggagcagttgccaggagactgaagcccttgaaaggaacgtgtgtgtgtgtgtgtgtgtgtgtgtgtgtgtgtgtgtgtgttatgcatatggagaagatactatagtggggcaccccaacctccttctctggtttataccagaactgtgcagtgttgtacagaatggttccttgggcttctggggccaggatgaaaactcctttgggaacaaggcgggaggcagagtgatgtagggagttgaaggagctgtggggcttggttgcctagcgattgcttcttttcctttgggcttaacccgagcagggatgagcccaggggtggttgggaggagtgagtgttattcaggggcgggagaggagctgaatgtcattttagcccactgcagccagcactggcattcacttcacagatgtcgtgaaataccactgtgtatccagtgagggtgggggtggatttgaactcagaactgacttcaaagcagacctttggctgttagaaaggaggcagcccagccattgagaaccttgtagcagcctatgtcctgaggctgtggggacaactttcccatggggatctccaagcatcagcttgtgtggagccaggaaggtgggaggggaccttctcagcagagtttacccatgggcagccaggatggtgtcagcttggctgccttaaccatcctcctgattatgaaatgtgcctggagcgatatgtgcctgagtcacacacatatactcacgggttcaacatcagaactgggagctcttagtgctgagagatagaaactgagacccaggagaggaaagggttggtcccatgttggctttctgactctagcctctgcttcaggcggtggtcatgtgttctctgcgtgacgtagccagaagaaggaaaggagcgagaactgtagagcaggctctcaggctcttgggtggtttcctccagggccagtagcaagctgtggacttacccctggaaatccgggaaattacagttttgtaaaccagggctctccttggaagcatctccgccttcttggttttgtccctcttcaggggtgtgtagaggccctccagagagggcagggacttggccacaatgtcacatttcactttacttttctcatctagaagagagatggttctcacggccaggccttccgtgttggctgggagagagctctagactcacatctgtggttagaacctagtggcagtgctccctagaggtgctctctgggagtttcttcatttctctcatctgaggaatgattgacagcccttcttgcattctagggttctgcggtcttacctagaagtagtggagaggagaaagaagctggacagtccaaggttttggaaccggctgtctgttggaacaggtggtggggtaaaatgggtggagggagggagagagagagaagggggaagggggaaggggcagcaggtgtttggggtctccttattgaaaggaggtctatgcaaatgctgcgcagataggcaaatcatatgtaaatgaaagcttttgtttggggggctgtgcatagtgcatcatctgggttagccagaaggttgacagattctgggggcggggaagggatcttctgccccaggcctgggcagagcctggttcttgccccagaagccacagctgcctgtgtagccttgtgggctgggagaagcagtgagctcatggcacagctgtagtggggagggtattgtgtagtgaggactgactaggtccgtgccctgtccagcatggtgccccatccagtgcagtaccccagccagcctgggccactggctccattgtctagcccaggtgacagagctaagccaagcagcctttctgtaagatgttgtcagctcccctccagcaaaaggctcagaatcccttagctagaagttctttctgagcccggagagacgccacacatggcagggtaggagcgataaagatccagccacgagctggagagttgggaatcaggcatgcttcttttatttgttatttccaattgcatgtgtatgagggtccacatgtatgcatgggtgcaggtgcgtatatgtgagtgtctgtgtaaaggtcagaggtcaacctcaggggtcatggctcaggaaccgtccactgcatttattcatgtgcgtgtgcgtgtgcgtgtgtgtgtgtgtgtgtgtgtgtgtgtgtgtgtgtgtgagagagagagagagagagagagaggagacaactttcaggattcagttccttccttcccttgaggggctcaaacccaggttgtcaggcttatgtggctactcaccagccaccgtgccaagctttttccatagttgccgggaattgaactcaggtcctgatgcttgcatggaaagcattttacttaccgggctgtctataccccagactccggatggactcctctgttcatgtaggtgctctgcctctagttagctagagtattcctctgttcaggtggatctgaacctacgtgatgtgctgggatgctggtgtctcgtgtcccatcttgtgttcccatctgtgtcttcgcccagctatgttctaaccatccctaggtttccctttccttcacaggcagcagtcaagaatggtgctgatgatactggccatcaagtggggactcgttctctctaaaaagattccagttctttctgcttttaccccacaggaaccaggtgctacgcccggcaggtgcatgtccccaggggacctctttaccgggtggctggcaccgctgtctctatctcctgcaacgtgagtgactatgagggccctgcccagcaagacttcgagtggttcatgtacagaccagaggccccagctacgtccctgggcattgtcagcaccaaggatagccagttctcctatgctgtctttgggcctcgtgtggcatctggtgacctgcaggtgcagcgcctgaagggagattcggtggtgctcaagattgctcgcctgcaggcccaggactctggcttttatgagtgctacaccccctccacggatacgcagtacctgggcaactacagtgccaaggtggagctgagaggtactgggctctgagctaggtggtgagagagcctcacaagcactggggttataggtataagccagcacgctcagatctatttttgcttcgtcttcctccttctctgtcatcttcttccttctcctcttctccccccacccccatcttctcagtactggaaattgaacctacagcatggaacataccaagggagcactctactaagctatattccctgtgttgttttttgagggctcactcttgtagcccaggctagcttacaactagcctaggttggcctgaaactggtgacaaaactcccacaattcactgtgtagctcaggcagtattgtgtcagctccagtgccatcaagccagtctttccagcagttttttttttttttttttggggggggggatgggctgaatcagaaactttccaagttgaccagaccagcactgaacttgttctgtagcccagacggcccttgaacttgactcttctgccttagcttcctgggtagttgcgattataggccggcaccatcaggtccagcctctttatctttagagaaggaagacaggattactttttttgagtatttaaaatggatcagtcttagacatcagagtaggggtcagtaggcttgctctgtgacgttcagcaagtagttattgaatatcttgatgtgcccagaccaagcttggcatctctgcggtatagaagaaaagctacagagcacagttcttacattctagaagcctagagagtgtgtagtgaaacaggatacgcacaggaaacaggagggatgctgctccaagccctctctcactaaagcctttctctccagttcttccagatgagctgcaggtatctgctgcccctccagggccccgagggcgccaggctgccacctccccctcacgcctcacagtgcacgaggggcaggagcttgcgctgggctgcctggctcagaccaaaacaaagaaacacacacacctgtcggtgtcctttgggagagccattccggaggcgccagtggggcgagccactctacaggaagtagtgggactgcgctccgacatggcggtggaggctggagcgccctacgctgagaggctagcttctggggagcttcggctgagcaaggaagggactgatcggtaccgaatggtggttgggggtgcccaggctggagactcgggcacctaccactgtacggccgctgagtggattcaggatcctgacggctcctgggtccaggtcgcagagaagagggcagtcctggctcatgttgatgtgcagactctatgtgagtgcagcatagcccactggggggggggggtgtctctcagttgggcatcgggagtgccgcacaagcatggagatacaaaggctatggggggaagggtgaaattcgggtcctggggtgagggagatataagaggcctctaaatttctgcaaagaagaattacaggtggggggcccaggcatctcagtgactcctcccatctcctgctgtgtttcagccagccagctggcggtgaccgtgggacctggtgaacgtcggattggcccaggcgaacccttagaactgctgtgcaatgtgtccggtgcactgcccccaccaggccgtcatgctgcgtactctgtgggctgggagatggcccctgcaggggctcctggacccggccgcctggtggcccagctggacacggaaggtataggcagcctgggccctggctatgaggaccggcacattgccatggagaaagtagcatccagaacctaccgactgcggctggaggctgccaggcccgctgatgcaggcacctaccgctgcctcgccaaagcctatgttcgagggtctgggacccggcttcgtgaagcggccagtgctcgttcccggcctctccctgtgcatgtgagagaagaaggtaagaggatgttgagcccttgacggggttcagaacttatagaatttatttcctaacctcttagcccctgggccttcacctggtaacccccgtgttctttgctctgcaggcgtggtgctagaggccgtggcgtggctagcagggggcactgtgtaccggggagagacggcctccctgctatgcaacatctctgtgcggggcggccccccagggctgcgactagcagccagctggtgggtggagaggccagaggagggcgagctgagctctggccctgctcagcttgtgggtggagtgggtcaggacggtgtggcagagctgggagtccggcctggagggggtcctgtcagtgtggagctggtgggacccagaagtcatcggctaagactgcatggcttggggcctgaggatgaaggcatataccactgtgccccaagtgcctgggtgcagcatgcggactacagctggtaccaggcaggcagtgcgcgctccgggcctgttacagtctacccctacacgcatggtgagtgacagccaccatctacccacctgttcctgctctgtttgcccctttccatcttcctgtcttcccttgcaatcctttttccacatccctttgcatgaagggtcccaagccggcctgagtgctgagaccgaggggaggggggtggtggtaggggtgcaggggggtgggggggatgggggatggttgtgtttgtgtgtgaagtgtaggtaggcaggactggcgcttagctctcccttggggagggctgagtctagaaaatctgcaggggagagtgtcagagaccgtggtactctctgagcagagcctgtcttcttttctgccagctgtggataccctatttgtgcccctgttggtgggtacaggagtcgccctagttaccggcgccagcgtcctggctaccatcacctgctgctttatgaagaggatgcggaagcggtgatctgtagcaccccaggtgagggaaaggaactgccttcctcaggcttcctgtgctgagctgtacctgggcaccatcagggggagaagcagccagcttcacagtcctgcaggatcgtatagcagggtaagggtcaaagggagcctcttcctcagccgactccacatgctctttccagttcttgcaggtgttgactgtcttccagccagtgccacccctcctctggttgcctggataccctctccctctgtccagcccacctttaatttatttgaccagccatcacctagagtgggagacatggctcccctgtccccaccttccctcaagtttcctggctgccgttcttagtcccacactcatgttgtaggaaggccagttcctgtcctcaaactagtttttctaaaatgtgaataaactggttttgtaaaatcgaggcctgttgtgtcttctcttgcggtgaagctataaaaggcagcatcgggggtgggtggggggagtggggtggtggtagggtggttgctggacaacctgggcctctcttcccaccataaacaccatctgtccctttgtgggccttgttacccaccaactgcatgaggggatgccggggtcccatctgttgtccaaaatgtctgtgctgagccaagtcctaatggggcttctatttgggaagggggacctaggaagaggaggggtgagttccagctgagctctgcccctttcacagagctccaagggacgagtcttttctgagctctccagactggggcacaccctcctctggtccatttctcctggttgaactagtcttggaccagactcctcccacaggccctggggcctcagtctttttcctcctgcccttaattattctctgacagcagccgaataggagcttcagaacacggctgcctacttaaggacagcagcagttgggagagcctgtgtcctctgtgtacacaagagccgcctcatctgcttacatctgatgccaggacttgcctgctggctagccgcaactccccgcctaaagggttctccggtcctaagagcctcagctgtcctaatactttgagcggcatccagtctaccttttttcattcagtagttgaaagtttattgagcattattgagtttgccaacatatcatttttttttaacagataaggaagctgaggcccagagaagtaataggtcttgctgagagtcatagaggtaattagtgacaatcagcattggtgctagaacacaggtctcctggctgtgccctggacagcggtgccctgagtgacctccaggaacagcttcaatgtctccattccattgcttcgtgtgcggataccaagcaccccacccctcttgtctagactcctcgattttctctgaattcaaaccctgctcagtccctgtgctcaggtccaatatgtgttcgtgggatcccagcaggttcatgtgcgtggacctcatctttgagagtgacccagctggtcccgaaacctgtggccattgctagatggaaggggagaggcaacaggcagcttgagtcctctctgcgtggacccactctgagctgggcactgggagggaggcctcgatgccccattggatgctggcttcttagcctgggacagagcagcagacttttattcgagggcagggatgggtatagccagggccagagtctgagccagtcctatcaggttacgtgctcacttgggctacacttagctccaggggggccagcctcaggtccattgccatgctgttgctgtcccctcaaccatcccaagatgactggggcaagacaaggatgcagtggaggtggaatgtgtctccagggtgccctgtcctgggaggacaggtggcagacagcagacacctgtaggtacaggctccattttctcccctagtcagtcttgccttgtgagtctcttaagagagttggtcttttgtggtaaggccaattcagctacagaccccccactgcctccttgggggtccctaaatggccttctcctatctctgttgccctctcgggtgccactggccagttaccaatgacgtttcttggacccagagttaagcccttcgagtctggacctgggtcccctctccccaacatttcccttcttgtttctctgttccttgaggaacctggggtgcttttcagttcctccagcttctcttccgcttagatgcttcacccaagtgcagtccccagacagacagtgtcaccgcgatctgggaacctgttaggtctgggaactagttagacgtgcagattttttttttttttttttggtttccgtcccggacctactgagtcagaatgcagggagtggggctggtaatctgtgttttaacaagcccatccaggtgagtaaagctttgtaactgctggctcccaccattccccactgccttactcaatccttagcttcctgtccctaatgccctctcacttgtggctataaccgcttgtgtgggctcctagggtcgagtcttttctgagctctccagactgaagccatacttccttcagtggctgggagttatttctgacctccaccttcgctgtgctctcgtgttaagaaccaggtctttgaatatcacacctgacacttactcaccgttctgaatgagccctgccactgtgccccaaggataaactacttccccctgggatccaggtacccttgtaaaaccctttattaagtctctccatggcctttcctctgcttcttgcttctgtggcaggacctgcaaggtttcattcctctctcacaaaatagttgtccttggctgtccccaggtcctgcttcagggcccctccctgctcagcatctacccccattgcttgtttgcctttctgacctctcgccatgggacagtgatgctggggagggcacccacacctgtgcccacctctacccagtgctctcttctctagttaggcaggcgtgtcacacatagggaggccagttgaggggaggtgagtgggggtggtagtccacctgacagcctgctccctaagccacgctccctggtttgaggctacctatatctggaagaaaaggatgcccatggatttctcacaaaggtgtgctgcaggtgacgatcatcgactgccaagccacttaccacctgagcgattatccattggctgtctctatctgctccaccttcccgatcaacccccatgagcccatccttctgtccatccatccacccatgaaccgatgtgaaggtcaaacacagacagactgacatgttctctcaccccgccctgcaaccctctctcttcaaaccaggacctcagccttccctactcgatcctggactcagcgggcctctcccaactttagctgttcctcgggacactgcctgcctcctcttcttccacctccactcgcagcttctgtgtacctgagtccggccccctggtctgccacagggggtgggaggaaaccagtcacaccttggactcactctctgggggtggcaggcagccattgtgctccttgtcagctccatctcccgcacctgccccctccccagccccttcttcctccaccttctcatccagcctgctggggatggaccagtagagatgggcatcaaggcgggccgcggcttctgccagttcccgagcactgcacgagggtgtgggcacctcaaaggtttcgtggaagctggcgtagtccacctcatagaaaccatcctccagggtgagcacggatgtgaaccggtggccccacaacacttcatccaccaggtacgagcttcgagcttggcacgtcattcctggggggtggggggaggagaagcggcatcagtcaaaggggcccctgccagaggattccttctcctgtctgtcatcccacaaccctcttctctctctgagagtcccacctctctttttagttagccctcttctctatctgccagcctatgttttcccctactctccattgagaagcttaaccttaagcctaaccttcctgtttcccacagagccgcctctacccacccccaagcattcccagacaatgggctgaactgattacaccccaggattgaaagctcaccatctcattaaaagtccagtcctttgtgcaacgtgccaatcgtctttacaaatgtgttttacatttatgtgtctatatgcgtgcatatgtatgtatgtggaggtcagaggacaacttggggagacagttgactccccaatgtgagacctggtaattcaactcaggtcagtagtcaggcgtggtggcaagctgagacatctctttggctctgggttttctcttacataaactaaactctgtctcctaggacccgtggtccctggttccattcccttaccacctgacacccccttgagtgtaaatatggggttcccttacatcttctcttcctcagattgaacactcatggccatttcttacttcatctgactcccccaaagcttacaatcttcattgcaaatcagaatggccaccaggcccaggtaagggctcatctgaagtgctttttcaactgtggccttatctgtgcataaaagaaggcttactatctcttgcttctcgcccagatgctttggtgaagcgggcccgtgattacattacataaacgcctttggaagctgcatcacgttgctgcagcaaagccagtggccaactaaaacccccagttctttctccaccggagcctttccatgctgtgcttacataagtgatttttttaaagcctaaatgtagaattttatatttattccccttaaatgtcatcatgttgggttttggctcattattcttgcttttcaaaagcagtttgaatcccaaaatactaccatccttcccagccttatctctagaaaagtcaagcaagctcccatccccatgtcctttacactgccccttcccagttcttgccctgagcctgtgtcctgtcttctctgttgggtttgtgcaccctcccctcggggcagatcattttgttcctacctcagaatcttcccaaaccggaatccatctcaaaaacagaggagtaagcattcactaatcagagaccggctctgacatcggaagtctggccctgagacatcttggggtcattggtattctttggcaaagctggaataagatgtatcagggatcgtagggaaagagaggccaccggggcctctgcagggagaaggcctgagaagcagaggtagggcttgggggagtagggttaggtgcaaagtggaggcagtggcagagggggaagagaaggcagatgaaaaagtccctgatagaaacctgtccgagattgtgtcagagagagggacagcgcagagacagagggagcagtgtggaatgggcatgggctagaaccagcctagttggagtgaaggaggagaggggagtgggaagacctgaggtggccatggagaagatgatgtttttgtctaggcccaggagccaggtttcaaggctagcagcagggagctagcctgtccgtagcagctccgcagctcctcctagtggcctcttggttcacctgcgtcttccttatgctccctgacggctaggacctcttcaaggacctgtttttgctccagtactagtctttttcctacctacctcccttttacttaggtcagttaaattccagagctatggacctctgggcttcaagaaccctgcacttaaccttcatcccaacactgtaccaggaaacactgaagatagatgtcctatgttcaacccaggctgtgctatttattggcttgtgacagcgggctatttatgggacctttctttggggctactcattctctgaaaaccgagcacagtcaaaagtaacctccaggggagctttgctgggcttaaatgaattcagagatgtaaaatgtagttcaaagtgacatagctgtcaggtcagggcctcaagctagtgccatttcatagacctcttccaagcttttcttgactctgcaaagtcaccctgtccatccctgtcatctcccgtcctctccccggcccccgctacccctcaggcctgtcaccctacactccattctctgtccatctttctgcgcctcccctggctgcttttcttgcccttgtcctgcatccctgctcccatcctccagcctgcccgcacccgtggcctccaccatgccctcgagaatgactacgatctcgaagtcgtccctctcgagggcgcggcgcgatgcctcccagaaggggctggcggcatcgatttcgtggctgatgacgagaggtgagacgagaaagaggcggtcgtcccccgtgtcaaagcccacgctgaggtcggtctggtgcaaagggatgaactcgccctcgagcgtctgacgggagcggatgagcttggctcggatggaggcctcgacgatgtgtgaggatcgcaggtcgcccacgcgaaacatgagacagaggcgcccgtcgcgcagagacaccacggcgtgcgaggagaagacgagagtggcggcgcgcttgttgggctgcgagatcttgacgaacatgcagcccaccatgaaagcgttcaccatggagcccaggatagcctgcagcagcagcagcacgatgccctcgggacactggtcggtgatgacgcggtgcccatagccgatggtggtctccgtctcgatggagaagaggaaggcggccacgaagccgttgaggttgttgacgcacggggtccacgcggtgtcctccaggtgctccaggtcgccgcggccgtaggcgatgagccaccagatggcgccgaagaagagccaagtgagcgcgtaggcgagcacgaagaagagcaggctgaggcgccactgcaggtccaccagcgtggtgaacaggtcggtcaggtagcggtaggtctcgcggacgttgccctgctgcacgttacagcgaccgtccttctccacgtagcgctggcgaccgcggcggcgtggcggctcctccgacccgggagagaaagcggcgttctcctgcgccatggcggccgcagcggggatcctgcggggtcttaataaaggtgtgccgagttgatggatctgccccgaactcagggccaatgctgtgagacaatctcccttcctgtctctttagccttagtttttccccactggtggattgggaacgataatccctaacatcccataaatctcagaaagttggggcacaagtgctggggagatggctcaaatgattcactggttgctcttccagcggatctgatttcgattcccagcacccacaagtcggctcacaaccggctgtaactcgcactctgctggcctccgagggtaatgcacagacgtacatgagggcaaactattacataaaataaaacaatggttaagaaaaagttgtatggctggagaggtgactcagcggggttaagagcgctgcctgcacttccagagaggttctgagttcaattcccaggaaccacatggtggcttacaacaatctgtaatgggatcttatgccctcttctgatgtgtctgaaggcagcggcagtgtaatcatatacattaagtaaataaatctttttaaaaaagaataaagaattatgagagagagagagagagagagagagagagagagagagttgtacagattacacaggataaagagcacagactgggtgtcgaagttcagtaagaaaagaggcattagccatctcgatgtcacagatctcagcgtcactacctcaagctggtgtatgtagcaactcacaggcaccccggatcagacatttagggtactgaagaggtagacttcttggcagttccttctccatgcaaagccctccctgcgatgaggacttccacagccctttccctggcaattatcccttcccccagcactcttcagcatcctgccagaagccccacctgaagactgttccctcggtgttctccctggcctcactctttctcctgctacatttcccctccaccccagacttcccaaggagaaagcaatgcagactgtgcacaaaaacctccagtgtgcaaaggttggatgtcctcagcattgggaacttcccactggcaattctaactgcttcaccgtggtcactgatgctctgataccagcccatttcccgccagggctctttcccacaggagacacgctgaaaagggtgggcaataggagattgggggccacgcgtgagctcaactgcccacggcaaggatgaaggaggcgccaggccatccagagttacgctagtctagtatctctcagattcgtattcttctaagagataagaaatcagaccaatcgaaacaccaaacacccacatcgaccccccctaccaatttcctgatttgcatttactaccctaccagcaaccccacccactcctgccatatgtcccaaagcccacattccacacaaagcccagattccaagcaaaacccacctggttttgcttcaaattcttcccccctgagaagcactctgggttataatcttcccggagagatggatggccagagtcggttcctaggctttcagggtcccctaggagatatggaccgtatgaacagaagtctgtagaataaggattaagactcatcaaccttcctttctctttcctgggatttgccatctcctcccattcagggtgaggggtggggcaggaaggctggggaagtggggagagcaggtggccctgtgggggcagaaatgtgacataaggatctcagatggtttggatgtttgaccagatcctagggagaaactgcatgaatatatacccacaaacccgacattccatttttaaactttggagccaagtgttctgtagccagcagacctttggagggtgtgtgtatgttaaagaaaggcacaaggaaaaaaccccaaaaagatggtttgtaaccccacacacttattttccatggaagtcaggagacatgacctgggaacacttcggcaatggcagattaagatcttcccctcccccaacagcaagcaggcttgtttttccctctctgcagcccaggatgtcctctgcacctcatctgtaagttttcagtgcctcgagaccccaggtctctttcatcctagtattaacttcaggtgggcttctagacagtcttcgtagggtctaaggtgatctgacctccatctacggccaggaatggggaaggattcccagtgtctgatcatccccagaacacgactgcccagggagcctactgatgacatcctagccattgccatctcgagaaaagctctcttcttcatgggacaggaaaggtgtgcggtgtccaccacctgaagagcaacgtcttcatttcttcctcttccctccaaataactccagttcttccgaccacagttcttgggcatgctgtgacccctttcagtaagatccgagcaccacattatcttggagtactccacctccctctagagagcgctggccagtacagggggcttatcttttggaaaggggtctgtcggggagaagtccctctgggagcagctccacccaaacccctcttggctcagaaataggggcccaaaccccaagtcccacaactcaactcacagagcctggagagaagagtagccagcagcagagacccttgggggttggcgtccatgtccctgacaccatctcccccagtaccctaggttccctctgagattgggagccgccgacactgctgtttctcctgaatgtaacggcagctcagactaggacttggtatctgtgtcatccccacttcccaggttcccctgctcctctctcgtttctatggcaaccagtctggctacagctccacagcgtccccctccctttcccagtcctgggtaccactctggctaatccacacgccacagctatttttagccaaagtccttcctcctggacacggagagtcatctcctcacctctttatagggacgaaagcaagtgtgtgtgtgggggaactggtgtgctcctcattctgggaaaatagaggcattggaaataaaatatttgatttcagaggccatctgggagtttgcagttcacaatccccagcagggaccactgggcaaaggtgctgccctccagacagcggacagaaggaccaggcccagcgtgacaaggctgcaattttttaagagacctctgatgcagaaggcagcaggcagagagaaaaaggtctgcagaggtaggggctagagaagcagggccagaggctccgccatcgtcatcaccatcactgatatacctgtgacccgaagaggtcccttcacttctctgagccatagtgattctgtctgtctcagagtgtgggcgtgggcaaacagccctcttctgctggcttcacctgggatgcagatcaaattaggtgatgtaaataaaagggttttgagatgtactttgctcatagcaaaaagttgagaaaaccctcaaat

SEQ ID NO: 837 - DNA, 2200 bp, Mus musculus
tcttccaggactctgaagcccctttgggtccgcttcacgtccaggaaaccgtgggtcaggccatgcctacataaatcagcagggtttgctgccaagactcagtggcccacatcacccaattggattctgaagcctacgccgcccccaggagtctccccagagccgcctacgcagaatgggcgtccctagccccacgccgctgagttcgctcctgctgctgctgctaatacttggaaccaggtgctacgcccggcaggtgcatgtccccaggggacctctttaccgggtggctggcaccgctgtctctatctcctgcaacgtgagtgactatgagggccctgcccagcaagacttcgagtggttcatgtacagaccagaggccccagctacgtccctgggcattgtcagcaccaaggatagccagttctcctatgctgtctttgggcctcgtgtggcatctggtgacctgcaggtgcagcgcctgaagggagattcggtggtgctcaagattgctcgcctgcaggcccaggactctggcttttatgagtgctacaccccctccacggatacgcagtacctgggcaactacagtgccaaggtggagctgagagtgcacgaggggcaggagcttgcgctgggctgcctggctcagaccaaaacaaagaaacacacacacctgtcggtgtcctttgggagagccattccggaggcgccagtggggcgagccactctacaggaagtagtgggactgcgctccgacatggcggtggaggctggagcgccctacgctgagaggctagcttctggggagcttcggctgagcaaggaagggactgatcggtaccgaatggtggttgggggtgcccaggctggagactcgggcacctaccactgtacggccgctgagtggattcaggatcctgacggctcctgggtccaggtcgcagagaagagggcagtcctggctcatgttgatgtgcagactctatccagccagctggcggtgaccgtgggacctggtgaacgtcggattggcccaggcgaacccttagaactgctgtgcaatgtgtccggtgcactgcccccaccaggccgtcatgctgcgtactctgtgggctgggagatggcccctgcaggggctcctggacccggccgcctggtggcccagctggacacggaaggtataggcagcctgggccctggctatgaggaccggcacattgccatggagaaagtagcatccagaacctaccgactgcggctggaggctgccaggcccgctgatgcaggcacctaccgctgcctcgccaaagcctatgttcgagggtctgggacccggcttcgtgaagcggccagtgctcgttcccggcctctccctgtgcatgtgagagaagaaggcgtggtgctagaggccgtggcgtggctagcagggggcactgtgtaccggggagagacggcctccctgctatgcaacatctctgtgcggggcggccccccagggctgcgactagcagccagctggtgggtggagaggccagaggagggcgagctgagctctggccctgctcagcttgtgggtggagtgggtcaggacggtgtggcagagctgggagtccggcctggagggggtcctgtcagtgtggagctggtgggacccagaagtcatcggctaagactgcatggcttggggcctgaggatgaaggcatataccactgtgccccaagtgcctgggtgcagcatgcggactacagctggtaccaggcaggcagtgcgcgctccgggcctgttacagtctacccctacacgcatgctgtggataccctatttgtgcccctgttggtgggtacaggagtcgccctagttaccggcgccagcgtcctggctaccatcacctgctgctttatgaagaggatgcggaagcggtgatctgtagcaccccagttcttgcaggtgttgactgtcttccagccagtgccacccctcctctggttgcctggataccctctccctctgtccagcccacctttaatttatttgaccagccatcacctagagtgggagacatggctcccctgtccccaccttccctcaagtttcctggctgccgttcttagtcccacactcatgttgtaggaaggccagttcctgtcctcaaactagtttttctaaaatgtgaataaactggttttgtaaaatcga

SEQ ID NO: 838 - protein, 592 aa, Mus musculus
SLRRPQESPQSRLRRMGVPSPTPLSSLLLLLLILGTRCYARQVHVPRGPLYRVAGTAVSISCNVSDYEGPAQQDFEWFMYRPEAPATSLGIVSTKDSQFSYAVFGPRVASGDLQVQRLKGDSVVLKIARLQAQDSGFYECYTPSTDTQYLGNYSAKVELRVHEGQELALGCLAQTKTKKHTHLSVSFGRAIPEAPVGRATLQEVVGLRSDMAVEAGAPYAERLASGELRLSKEGTDRYRMVVGGAQAGDSGTYHCTAAEWIQDPDGSWVQVAEKRAVLAHVDVQTLSSQLAVTVGPGERRIGPGEPLELLCNVSGALPPPGRHAAYSVGWEMAPAGAPGPGRLVAQLDTEGIGSLGPGYEDRHIAMEKVASRYLRLEAARPADAGYCLAKAYVRGSGTRLREAASARSRPLPVHVREEGVVLEAVAWLAGGTVYRGETASLLCNISVRGGPPGLRLAASWWVERPEEGELSSGPAQLVGGVGQDGVAELGVRPGGGPVSVELVGPRSHRLRLHGLGPEDEGIYHCAPSAWVQHADYSWYQAGSARSGPVTVYPYTHAVDTLFVPLLVGTGVVTGASVLATITCCFMKRMRKR

SEQ ID NO: 839 - DNA, 49638 bp, Homo sapiens
cactgggagcatacaagagcctgctaatcccatcctaagttgacagagagggtgggcagtagttgggaagggtaggacaactaggtcttcaagataggagtgccagattatgcttcaaatcagaatggaagggtacacatgcagatgggacaaagagctgtgccagggagggagaggaggggcatgggacactggcctctctgagcaaaagggataagggtgagtgccccaaggcaggggtgggcctttccttgcagatggacagcttcttctctgagtcagtgggaaggaggccaccgtggcctgggcctttccagggcagcagccactgcagctccttgaactctggcatgggggaggctagaatggaggggaggatgggaggccagtaccttgatgcctgcgcttcggcacttgcccacagcatctggcacagcagcccggggagggtcaatcatagacatgagccccacaaagcaaagcttctccgtgggaaagttcagctcatccgtgtcgaatttgaagccccgaggaaactttccagatggcagattcagttgacagaatcctaaaggggggcagaagggatcagtgagatccgcagagtggcttcctggacgcccccacagtcccccaccccagggatgccgcagaggcttgggaatccccttctgagcctcctgtttctggcctctcacccagcacacgctccccaagtccccccagctccatgtaggcattttgaaaggcatcttgcatctccttgtcgagcgggatctccttgccctgcaccaggatggtggagcaccggtccagaatgcgctctggggcccccttcatcaccagcacgtggctctgggggctgtcttctcgctcgtggatagacagctggagagacaacaggtagttacagagagggccatacttgtcttggtagcgcggcatagagcagcagctggtaaggaaaccaccttagaaaagtagccccaacccatcaaagattgtcaacaaagagaatctccttgtgcaggggggtgtttagacctcacagttccaacacttgtaacctgagagccacctccgtaggacagtctttcattcaacaaatatttattgaggtcaggttaagacaggcactgtgctaggggctgaacggctccctcctcagcatccccaccaccacctggcctcagggggctttacctctatggataataaggaatgctgagattgcattcttggcatttaacaggtgcctaaaggctaaggggcaccataaaggaattacagaattatggtttcactgactggggtagaagagttggaaggctaggccagaggatgcggagctatgggaagaagagttgagagagtgacagattgtagtaagggatggagtaaggtttgggagctggggctagttgcaatcagacatgcagtcatatgagctgtcctgggggacttagcagggggagggaacatgaccctcagacacccccactcctgctagtgatgattccccttggctttgtccaccctcacccatttatatccctctctcttcctctgtcctggcaacccaagcagacctggtacttgttggtagagttgaaaggaatctctgccaccttggggtttctgtctctcattttcctcactgagccacaggagagctcaatgcacttgagcagagctgactcagaggcatcaccagctgtgtcccgctgccagaagagacaagaattcagtgtcagcatgggagggaagggagtggaggatcaggtgaaggcggcactgaaacccccaaggcagccacatcatgtgagaaggaaagctggggccagcaagaggctttggagacacccccaaaacatacctggtgtgtgtcctgaccccctaccttagacacggagatgttctcctgtcctgccttgaagacggcgcggttgcagagaccagcaattcgagacagggccgtccacgtaggggatcgtttgtcaaaagtggcccctgggaggaaatgagggggaaccaggagcgtggctccctttagagcctttatctcaaccactcaccccaccacgccactgccctcagcctcctctaatcctatccaccccctctggagcacccaatcaccagactgatcttcggtggtgtcagcctcatggatttggttgtcgaaccacatgtgggcgacggtcatgcggttctgggtgagggtgcccgtcttgtccgagcagatggtggacgtggagcccagcgtctccaccgcctccaggttcttcaccaggcagttcttccgtgccatgcgcttggctgtcagggtcaggcacacctggtagagaaagaggagaataaaaaaggttaaggctgaagccggagatggccataaccttaccctagaccgtggctccattcctcctcccctgattctactccactaacttgaatgggtgggacttagctgtaaataatgaatgttcaattttagatgtgttgagatcatgagtatctgttaagatgaaatgcccattagggggtttaagacgtttgactagagctccagagagggccagagcagagctgagcatagggatgtctgagtcatcaacacagaagggacactgcaaactgggaggagattggctcttgctcagggtgtaggaagaacagacagctgaggcctgagaatcagtgtagggggagcaggaagggacagaggagaggcgaaccaggatagtgacacatcacagcaatcgacaaaagagagaatggtaggagggtggacagcagtatctgtttcagcagcagagttagggaggagagctgagaaaaggtccctggatttgctagttagtgactggtgacctttgagacagcctctacaggagacttggacggaatgagacccagactgctggcagatcgtgagaaaaggcagccgtgacaagctccaaaagagaaactgagtgcctaagaatagccccacctgagatttctcaactcataccctaagccatgtattaagtgatctctgagtatcgcatccaataagtgactctagggggaaaaagtagtgagaagctacaagcaactgtgcctctatcactctgaggaaagagtagtgagaccctcccctggtggcacctcagcctgacccactcacagtgacagtggccagaagcccctcaggcacgttggccactatgatgccgatgaggaagatgactgcctccagccagctgtagcccaggatgagggagagcacgaagaaggagacccccaggaatacagcgacccctgtgatcagctggatgaagtgttcaatctccattgctatgggtgtccgcccaacctccaggcctgaggcgagagtagctatgcggcccatcaccgtccggtctcctgtggcaatcacaatgcccctggcagtgcctgcaacatggtggggcatcaggttgggtgccttgtggctcccagggactgcagtcccatcctatttcctgagcaaggaaaatcatcacaggataggtgagccaaagccgcagatctggaggccacattcagtaggttgtccccacttggccttcctttccctggatagatcgccaatccttgaatcaatacaacagcaaattattttctcttgtactcgagcctggggagaagcttgcaaataatctcaaagttcaaatagacaagattcaataaataaaaattgcctgtggcattttggtaaaatcattcccatacttgataccatccaaaagtatattatgaacacaaagtaaagcactcattatggattttccatccagtcttaagattttctttctcaacattaggcatgaatctctatagaggaagccaggcaattgctaacccttgtgtgacattacaggggtcttctgggaaggaagggtggtgtattgaaaaaagcatgcacattggagccagccaaatttgggtttgaatccttatttgaattcctatctcggtgctgttttaatatttagatgagattgtgctttaatatacttaggccagtgcctggaacatagcgggtgctcaacaaatatctcatttatttcctttcctcttttcaaagccaattgcagagtaagcaataggaatgtattactaggcatttctgaataaatcaattgtgggaaatgtaaatttcaaaatctcagtacattaaaaatttaggaaatttggccaggctcggtggctcatgcctgtaatcccagcactttgggaggctgaggcaggaggatcacttgagcccaggagtttgaggccagcctgggtaacatagtgagaccccatctctaatatacatatatatatattagctgggtgtggtatcacacgcctgtagtcccaaatactctggaggctgaggtgggagatcgcttgagcctgggaggtcaaggctgcagtgagctgtgattgcaccactgcactccagtctgggtgacaaagcaagatcttgtctcaaaagcaaaacaaaaaacaaacttaggaaatgtaatgtgtggtgatttttatttgtacagttggccctccatattcacagattccatgtccatagattcaaccaacctcagatcgaaaatatttggagctaaataaaaataacaatacaacaataaaaataatacaaatttaaaaacaaaacagtataaaaattacattgcactcggtattataagtaatctagagttgattcaaagtatatgggaggatgtgcgcagattatatgcaaatattatgcgatttcatatcagggcctttgaggatccttagattttggtaacgaagggggtcctggaaccaatccctcatggattccaagcagtggaattccaacttgtcgaagaagggaaaaaaaccacagagaaacataatacactgaggagaaatgagtaatggacaggggaagtgtggattgggatatgaggcctcctttgccctattttcagaggccactggtctagtgaggcctctttctgtctcttccctcctactccttctctgatgcagccctgactctgctcactggctttaccacagagggcacaggtttcagttgtgcttggacccctgccattaagtaatggcagctctgggagttcttattgacctttgtttatctctagaacccagaacagggatggggcaaactgggtagtctgtgcatggtgaaacatgtcttttgatgtaacaaaggttagaagcagcctgaagtaggccccaagtgttcacctggccagaatgccttcttggccctcccagaccctggggccctggccaaagcaaaggttatcgaagggggcagcgaggcccagaaccacaaggaatagaagcatcaatcaaatccaaagactcctaagaatccaggttggttctgagcgtatgtgcatctgtgtgtgcgcatgcgtaaggggttcttaacccaatacctgaaagctttgaaatccactcaagtcttggggtggacagaacagagatctccctggggaagggagatacatttcccatggagtcaggctgccctcagtcaataccctgctctgtggagggtgtttccataatattcagggccccctgacccctcaattgccccaccaatggcagagcttttgccaggtaagtactaccagagcccttcatcctgactatggattcaggattcagactctttcctacagggggcagcctggcttctcaccttcaacacagttggtggagaagaaacagatattgcgggtctccagggggttctcatgggtgaactcgggggagcgggtctggggctccgactctcctgttaaggatgagttatccacctgaggaggaaggagtgcatagtcatcagactggcagagccacttgtatgcacacagctgtctcctgaaccacctccaaccacactcaatcttcatgacacgaggaacaaagtcacacttgccctcatcacatatttatggcattactcatctattgcccctgccctggtttggaattctgactcctcctgacttcttatgtgacctcgggttacttgcttaaccaagagagcctccatgtactcaactgtaaaatggtgaatgtaaacagaatctctgccttgcacaaccacagggggagacactaacactgtagttatgaaaatgcacctcctggggtcattcaggatgcaacgtgtgtggccacatgcagcagccctgcatgattacaccactctttcagaattacatcagatagcacatcgaacatatataaagcagctgacacataattggtattcaatacacgattgctaaaaagtggacaacaaagaaatacctggggcatagagcattcataacacacagatgcaaggaggcactgcacaagcaccccacactgagagaaggtttagcaggggcgtaggcatggtgttgacatttggacctgggtctctccacctttaaacctcactgggcccctctcagctctgcacacagccttctccttagactcaactgcttgctctggtatgacctcctcaccttacagccatgagaagagatgatccggaggtcagcagggacgcggtctccacccttcacctccaccaggtctcccaccaccacttcctctgcgttgatctgcatcttctctccctcccggatcacaagggcttgctgtggggagccacaggcagctcatgaaatgcttgtctctgcccctgccttcttctcctgctggtctcccacaccgtcaagcagaaggagaagccccataaacaattaggtgctggcatggaaagctggaggatcttttctgtccatctctatcttagtgcctgggagctgacagaagatgagctggactcttgccaaaaccttacagcctagcccagagcccagccctgccatcttacctgaggtaccatgttcttgaaggaatccatgatcttggagctcttggcctcctggtagtaggagaagcagccagtgacaatgaccacagctgccagcaccacacccagatatagctggtaaggagaaagagtttcagggacctgaccttccccccaaccctaaaggggcagctgccacttgggatgagcaggcagtgccatccaagatgacagcccagacctttgtctgtgactgagagtgatgatggtaggggaaagcccttctcactaacctcccccttgatctgccaacctcaagcctgttaagactagaaatgggagggaaagtcttaggaagttcccagggttaggactttgctaggggatgaagacccaggcacacagacaggctcacttaagcggggaggaacagggagagattgtttcattaattaatgagtatgtgaatgtgtatgcactgttggcggaggagtactttacagatatatatagaagcctctcccctttccagcctaagatgcaggggcatctgtaggactgttatgtgagggccttgttccctgcccaccccccactgtgttgggggttcagggttggaggacagtcacgggctgttcccgggtcaggcgtgtgggctcacattgtcgttggatggttcatcctccatggcagcctggatgccgtaggccaggaagcagaggatagccccaatccacagcaggatggagaaccccccgaaaagctgacggcagaacttgacccactcaggggttgtgggaggtggtgtgagggcgttgggcccatctcgagccagaacgtcctgagcccgctggttggtgaggccctgagggagcaaggagaggcgtaggggcacgcatccggagccaacccagccagtcaccatgcccatcccttcagctcccgggcatgggaagaatgcccagaaggaaagtcccacctggttggaaggggtgggggaccatcaggagagaccacatggaggaggtggcatttgtgatgcaacttggagggcttgagggctgagaagggtttgactgggcttgacccctaattatattggattgagacaacacctatggttagggccataacatctcccctggaggcagtctggataagctccctggaaagacacctcaactgttttttccccatctctcttccttcagattattttatcaaggattctaggagagtcctagatttttttttaagagatggattcttgctatgttgcccaggctggagcgcagtggtgcaattatagctcactgcatccttgaaccctgggctaaagcaatccttccacctcagcctcccaagtagctgagactacaggtgggcacctccacaccctgctcaagtcctacattattgaccatcagtgtcacacaactttggcaatcacctgtcactttccacagaaagccttgcctggccctattccctcagccccaggctggttcagatgcttctttctggttccccatggtgttctatacttgattctagagctgcactcaccatattgcattggaatcctaggattgcattttttctgctactagactttgagctcctttaaagcagggaccgtttctttttttttttttttcattcattcattcatttaataaatgtatatccagtgccaggcacaattgtcactctgcggatgcagagatggacaagaccaacaaagtctctgcccttgaggagcttatgatctggagaggtgacacacaataaacaaatacatattagtgccagatagaaaagtgttactaaggaaaataaagtaaggtaaaggaataggggcatagaattttagaaagagcagtcagggaaggcccataaaggagatatacacccactaaatatttgtctgtttgtttgcttgtttcaagatggagtctcactctatcgcccagtctggagtacagtggtatgatctcggctcactgaaacctccgcctcctgggttcaagccattctcctgcttcagcctctcgagtaggtgggattacaggtgcccatcactgtgccaagctaatttttgtatttttagtggagatggggttttgccatgttgcccaggctgctctcaaaccgctgaccttaagtgatctgcctgccttggcctcccaaagtggtaaaattataggcatgagccaccacacccagcattttttgattaatgatttttaaacaaatttttaattgaagggcttagcaattgactgtaccagttactgttcatgtgaccttgggaagttactctccctctctgagtctcctttgtttaataaacaggtctgcaatacctatctcaaagggttgttgtaaagattagagaaatgtatgtaacgcatctatcacaatgtcacatatgtagcaggggcccagcaaatcactgtaaccacaggaatgggctgtcagcccatgtgcatcagctgtcagctctgtggaaggctgtgtgcaactgaagttgcttggggtatagggaagggccctgcctggaggccctctggggcctgggtcatagggagtcctggcttctagggtatacagggagagagctttgggctaggatgcaggggatccaaattctagttctggctgtgccaccaactagctgcatgtccttgggccagtccttgtttctgggcctcagtttcctcatctgtaaagaaggctggattacagttttaaggctcctgccaccttgatgctgcatggttttcttgcctcttttgttccttccctagaagcccctccactcaccttggacaggtccacttggtatttgcggcccagctcatccaaggacagcttgtggtcatcctggggaagggagggtgagttactttggggaggaggtatctaagatgcatatgagggtactgcagggcacaggggtgagttgagcagcatgggggacacggagtttctctgagtgcaatgggctgcagggacagctctcccagcatggggcccctcctccatggcccagcagttccctcaccattgccacctccttcttcagctcatccagttccttctccttctgtttcttcttgccgcccccattctctgccgtggtggcggcaggtgagtactcacggccagcctgagggagggagagccggagagtcagggaagagaggggctggggcctccattcccaccactcagccagggagcccaggcagtgggggtgtgtgttcaaaagcagcggctgccttgggggagataggggggatggagggtgagggaccctaggccctcagtttgtagactattggcagaaccaggggctcccatgtgagtttcagagaagggtgaggggctcaggactgaaaagcaccacttgagtggtttaatgcttgggcttctgctaagattttgtttgttgaaaggaccctgctgctaaatacaaaacaaaacaaaaattttgaaaacctgtatcctacactatttgggaaaattctggaagggagtggacagggttttgtggggggttgttgagggagtagaatcactctgtaggaatgtcttagcccaacaccatggcaattttacttagagaggggtagaaatactcaggaacttgggggagtaagagtctttggggagccaggggattaggcaggaacgtgtccagaggagagccaggtctggtggtggaatggtagggatggaaagagcaggcctgatggactgagaggaggcagtagctggagagtcagggcatgtccaggaagtggagacatggggtgtgctgggagccctctccatcctgctgggcaggcctgcccgttactagacgggaggcaactcacaggactggacccccaaagcacaattgggtaacatgggaactgagccccatttgtcccaaaacataagaaattgtatctgagagtaaatctaaaactacattttatatagtttttaagtctagacattcctgggtcatctggtgaatcagatggcctttttttttttcttgagacagggtctcactctgtcacccaggatggaatgcagtgtgcaatttcagctcactgcaccctccgcttctagggctcaagcaatactcccacctcagcctctcaagtagctggggccacaagcatgcaccaccacgctcagctaatttaaaacaattttctttctttctttctttttttttttttttttagatataaggtctcactatattgcctgggctcaagtgatcctcccaccttggcctcccagaatgctgggattataggtgtgagccactgcgcctgagcagatggacattttaattgtagtcttatgaggctcctgatttcccttccactccagggcctgtgggctcaccactaccagccttccagggtctcacagggaacttcttggggacagggtgggaaatctttccttctaagaggaggccctcttggggtgatagaataggatagaggctgaggaaggcctgggtagccatgaaaagttcccaaaaaggtaccttcttacttcctcttctgccccagtcttctctcctcccacttccctcaggaaatagagtccttgtcatagaggggctgctcagtttccacctggtgcctatttctccactggattctgcaaagtctgcactaggctttcaggaattagttttcccacactatgatgttaacttttgtttcccataaagagtggatacctgggtagggtccacagccaaggtgtttgcttttttttttttttttttttgcaggataatgcagttttgggggttttgtttgcattttaaaaaatatactttttttggagcaattttctggttcacagcaaaattgagtgggaagtagagaaagttctcatatatctcctgcccccacacatgcacagcctcacccactatcaacaccctgcatcagagtgttacatttgctgcaatcatgaacctgcattgatacatctttatcgtccaaagcccatagtttaagtttgagttcactcttggtgtacattctatgggtttgggcaaatgtatactgacgtgtatccgccattgtggtatcatatggaatagcttcactgccctaagacttttgtgctccagggtaatgccttttttacttatcagagtcaggagcaatcccagaagtatggcagctgccttgttcataagaggtcgccaattcagcatcttgagaggtagaagtctgaccagtacaatcagaagcaagggtaggggtgggggatgcaaggagaagtcaacactgttgttcccaagataccaatgatttaaaaagatatgagcttttggaggctgtgttgctcagaagtgctcttctcagaaaaggtgaccagtaaaatcgtgggtttgtctccacctgaagcatctatgaatctggtataattttggcctcctaaaggcagatcttcttggggagaccgagcagcccaatggaaggggtggggaaaggcttgtgagtggttctgcctctgcctttctcaggtgacctaagaggattcatttaattgagtggattgaaatgctttacattcactaactgtctgtggtgggacagagctgagaaaaggaagaaatgcaatcaagggaacagaggcaagagatcaggctggctgagcttcagtgtgaccctcaggaacttcagggacagaagggggcccaggcatacacagaggagcagggctgggtctgtgggcagaagagcagggtgcagaggaatttctgtatattcagatgtgaaataaatttcataaaaattggaataaaatgcatgctttttaaaaacttgctggtccatgcactttggcatgctggattgtggctgagctaagcagctccacgcagtgcctccttttcccaagctcccgccctgctctccagcaggcttagagcttgagacacactgccccttccccctcctcctgtcctggcaaagatctcaggctctgcagccaggagcctgcagagatttggggccagcggctgcccaggcaagaaagaaagagaggaagcaaggacccccccaacctccctccactcctccctcccccaaccacaagtccccctctctgggtcttgaatgctgaaggagaacagagagtcctttttgagaaagccagaggctgggacagagtgggggcagctgggaatccgccaacgctccccccatctcagcctctccgtggtagctggagcaggctgggctccctcccaccagtgtcgtcccttcccccaactcccacgctgcccttcacagccactgggtaatggggggacagtgaagcctgcctctgcagtggagatgcaggggagaagggattggaggaaaaatcatccctagaacaggttgtgggtgtcagatgccttccctcttcaggggtcgttggtaggttgaactctaagctccaggccctaaatacccccacctcacccagcctcttagtttaaacagcccagatctgctcctcatcttgctattgcatcacccacagcaacttaggatggtgattaaggggagtttgggggtgctaggggaaaaagacagactggaaaagtcaaggtctcatcacttcccaagcaagacctcctgagctgggtctaccttgctctaagatggagcagggtagggggctacctcccctccttctctcttcacttggatgggggaaatggagggcttatctgatcctttaacccctgcctcttctcagaggtcctgcatctcagctagggatgccctttccatggggagccagagatgtcaagatgcagctgaaggtcccaagacagtatatcttcctgcagctatgacctcttcctccgtgaagcccatacctcacagctcctaagggcaggctcacagactctcaagcacccccacacagtgacatttatgcttgtgcaggcttgaaggcttgtacatttacaaatttgcctgctgagacacaaacacaggtactcatccatgagtaactgcaggactccccgcctatggagaacacgtggtcaaggacacacactcacacacacacagacacagacacacagatacatgcatgcactccaattctatttatggctccaaccctagctcaggaaccctggtgtccaggctcaggatttcccagctgctcaactaggtgcaataacatgtccttgcctgactcctcctgggcccagaaacacccacggctccccctaggcacagtcttcctcataccctcctgttccgcagcatgccctttccctctgtgtcctcttttgccagtattccacaaaaggaaagcagccaggcacagcatgtaaaaggattgggccactcttctccatatgggaatttcatttccaagaattcaaagccctctccctgcccgccccattgttgttaatcttcctcttggtgtagccattgctgcagaatgccatggacgggtggactgggggggggtcactgtcaccagcctctgggaaagtcctcaaagcccatggcttggaacccacggacaatgctgctcgggacatccggaggggtgctggggtgggggctggggcatcattcttcctccccacaccccgcccagctgtccttggcactcagggcccctggagctggtgtccggaactacttggtgactctgggagccggatgctctactgcccctctctaacctcaaaatggacccccagcctctcaggctaggactcccagaggaatggatattttcaggaggtggcaaagacaggaggactcacagtgccaaacatcctttcagctgggaggccgggagatgcagtgagaggagggactgctgcagggaaggactagagatgtgggagtggggtggagggagagatggagggggcatgtgtggtgggctgtgggtctaactgtgggcagggggctggggcgtgcagaggagaggagagcactagggtatgtgaccgccgtgggatctgtacacacattggtagtttggagactgttagtttcaagttccaagtatcccactcagctcctctctcccgctccttccacatcccattcccacttcatccttcctcagcagcctccctcaccctctagactgcgacccctgctctttagggatactcaccccacggcccatcttggggcagagtggctgagggaccttagcgggagaggtcaccaggaggatcccaagcccacaccagcccgtctgggacagtcggagaccctggcagacagagaaagccaaagcaacagggtagctttaaataggtccttctccccctctcccccgccttcccctcctccgaaagaaacgtttgttgaaacaggatccctgaggactcctcccctcccgcccctttagccactggccctagacagcccgtttgtcccacggcatgcccccccttggctcctctcaaccccctctggcctgtggcactcacaactgagagaggctgcaagggaagggggcctgggtcccaggttggggggatatgccccctaggatctggctgaaggggagcagttgactcagaatcccaggatgacagagaccatgtggcctaactcttcttttccaagtgggtaaactgaggctcagagagattaaacaatttgaattgataagacagagccagaactcaggtctcccgagtctacatccaatctcccagagaaagaaagaaacatagaccactctgttccttctattatagaggttgcagggacactgaagcccagaaatagaatttgaaccgaaggctgacctctgcacttgaggcacctggaaggggggcccaggaggagtcaaaggtggctcgggaggcagcgggaagtttggagatggaggcaagagggtgtccccaaaccctgccagatgtaacctctccaaagttttgaaggagaatcaagactctggtagggaggggcaggccagggctagaggggaacgggtgggactcctagcaggcacctgatgacatctctgggttttgtttacccctcgtttaccgtttcattgctgttgaagagctctagactgaatctatgcctgagtagagtagtgatagggagaagtcaaaagagaggaaaatacagaacctctaagatgtgtgtgaaggtcaatatcatagcaaatatcagacatgtgaacgggaaaggagagcgactgtttccttcttccagtggggaaggggaagcaaagctgcagcatgcaggactgaggctggagaacaggcctctctgcagtgaagtgggggagattggaaatgtctgaggagtgaggatgcccatcagagtcaggagcaatcccagaaatgcctaaggctttgcctggggctggaaagggtatctttaaccttataccagctagaaactggggacaacgagatgacccaggacaggaccagctggtctaggggtgttgttgctgctcatttgatgagtaatccaaaggatgaggggcacagagaggaaggggaacccagaaggggcagagagaaaagaaaaaattctgctcccgccttctactgggaacagtcagaggacaggattcccctggagtacccctgtttctctgggcacagagatggagtgaggggaagccagcggagtggggcaggtctaagtgtcctgagtgcaaagaaagcagagaggaagggagggagggaaggggggctttggccagaggcctaaggtgcctgctggctgggctgggtccatctctggccccagagggaactccctgcagagggattatcagcctctcctctagcaaatccactctcagggcacaaggctaacatctgaattccctaaataactggccccctccgggcctgcagttgagattttccattacagggacctggtaggtcacatctcacttccacgctccttccctctctgggttacagtcagaaagggtgggtaggatggggccaacagggccttctcatggcccccctctccgagctcagatttggtcttgggagagaatgggcagagggaggaaacaatgaagggaacagataccagttcagcccctgtgtgttaaggagagagtgagaggggagtagcgggaaagcctgtggttagacaccaggagagactgtctaaagcaaagtcactccagagtggccccgaggcagctagggagatcaacattggggcaggcttgcctgggggctgtgggaacaacatgataaattggggtttaggaagcgcctgttccgtaggttcctgggttggaattcctgggtaatcttctgcccagccctctccagaacacaacctgagataggagagaaaacgtcagtccccgaatctgaaggtgtgcaaacctcaagcactctaacagttttcatcccacccctcacccctgctggcacctcccagtactgcccagtccttccaaaggccctggctctggtccctgtggccaaactcaataccggaaaggatgtgcccttcctctgcccctacagcctgctggggctccctgccatgccctgcatttgggcgagagcacagcccgaggggcgctgctgctcacatatttagggctcagagaaatcaaagagtgggcaggacacccagggcctatacttccaccgtgcatcactgaccaccctccttgcccagtgagagctgaggctctggagtggtctacctccttcttgtccaccatgaacctcagcctccaggatattaacaggtgtagacacctgatcgtttgatctggagtgcctgggttgggctactgtttcttcaaacacagtcagcagtaccagtttggatcaaggcccttggagtaagaggagcaaaggagagagaaagaaagacttgaaagcaggaggatggaaggccaagatgcctgggctggggagtgggctgagaaagtcacagatcaggagggggatccaccaagggcaaagtggggatggagtggtcctgaatcaaatatttggttggtaagaagtgtgtgtgtgtgtgtgtgtgtgtgtgtgtgtgtgtgtgtgtgtgtgacagagagagagagagagagagaccaagacagttggagagagacaggagtgtgcatgtgcctgtgtacagatgtgtgctagttaatgactgggaggacctgagcgttgggtcctgtgtgaggtatgagacggagtggtggtaccaaaccacattccaaaggaggagctcctcaggggagaggacaacactcattcggatgtgtggccaatctgctatgaatcggttgtctgtatgcaagcatgagtacagaggtgcgtgtgagtccgtgagtgcgcatcgcttctcggccttttggctaagatcaagtgtggagtccgtgtgtgcgtgcatgtgggccattggggagctcatgtgaagccgggtgtgggtgtacgtgagagtccatgggagaatgtgtgtgtgcacagggagggggtggggacgctgctcagctgcagatgggctttcaaggtctccaagaaacagttttgtttcctaagtgactggcctcctggggcctccagcccagacttgaaggttgtttcaagatcatgaaagagagagaggaggagggagagtgggagggaaggaagagctgggaggctctatcacccccatcgtccctcctcccgccccggcaccccacttctctcccccagtcctgatttgggcccagctctccagccctgctcctctggtcctcctctcggctgccaacccccctctgggcatctctccttcttctccttcttccattccctctaactctcctttctttttttctttagggcctgtggtcttgtcactgctatcaggcttctgaggtcttctgggagtgtgggtggagtttttctgcttccaaagggagcccaccttgggggatgagatgaggggagccgggaaggcctggactggccatgacaagtgtccaagaaagatgacttctcactctccctgcctctccagccctctgtcctcccactccctcaggttatagtgacctgttaaaaggttgggatcagccaggtggggtggcttatgcctgtaatcccagcactttaggaggccgaggtgggcggatcatgaagtcaggagtttgagaccatcctggccaacatggtgaaaccccgtctctactaaaaatataaaaattagctgggagtggtggcacatgcctgtaatcccagctactcggggggctgaggcagaagaatcgcttgaaccagggagtcggaggttgtagtgagccgagatcgtgccagtgcactccagcctggcgacagagcgagactccgtctcaaaaataaataaataaataaataaataaataaataaataaataaatataaaaaggttgggctcagagccccagagtggctgtccaagtcctgctgctgtgtcagtttcctcactggactacaaggatggtgttgaattttctccccatctctcctttaacatctgctcctccgttttctttttggtctttcttttatttttatcttattttttttctttatctgttaaaccattccttcaacatggtctttcttttcagtctactcaaagtagattctaaaaatctctgctggctgggcgcggtggctcatgcctgttttcccagcactttgggaggctgaggtgggtagatcacctgagtccatgagttcaagaccagcctgggcaacatggtgaaacctgtctctaataaaaatacgaaaaaattagctgagcgtggtggcatgcacctgtagtcttagctactcataaggctgaagtgggagaatcacctgagcccagggaggttgagaggctgcagtgagccaagattgcaccactgtactccagcctgggcaatcgaagtgagaccctgtctcaaaaacaacaacaacaacaacagcaacagcaacaaaaaacaataaacagacaaaaaaaaacaattcttcttctctctcccttaaaaaaaaaggacagattctcactctgtcacccaggctggagtacagcggcatgatcaactgcagcctcgacctcctgggctcaagccgtcatcctgcctcagcctccagagttgtgcatctattggcatgcgccaccacacccagctggttctgtcattttaatctctccccagagtatttttattatcctctttattgttaaaaccacactgtatagaatttagaaaataggatgtaaaagcacccagaagcattttccccagcctctgcctgtgctgcattcccacctcctttcgttcttacttctctctggattcagatagctccatgttgtgttctgcctgtgccttcttcacgtggaagtcccaagggagaaaaaggaaaggacccatggtgtagcccagggaacccatgtcaacccttcccaggagcatgaaggcctgggctattctgtgcctctgctttccctcctgtcctctcacagtccccaccgtggtccaatgcaatggactcttgcctgaaagtcaagtcagctgaggctagtcctgctgaagccactaaccacctgtgtgatgttggacaagaggcttctctactctgaccttggcatcttcatctgaatgacaaggaacgggatgagaaaatctgtgagtaattccagcactttgggaggcacgaggtcaggagattgagaccatcctggctaatgcgtgaaactccatctctactaaaaatacacatgcacacaaaattagctgggcgtggtggcaggcacctgtagtcccagctactcaggaggctgaggcaggagaatggcttgatcctgggaggtgcaggttgcagtgagctgaggttgcgccactgcactccagcctgggtgacagagcgagactctgtctcaaaaaaagaaaaaaaaaagaaaatctctgaggtccctctccagttctgatgatccccaaattccaggctatttctgcctcagcgcacagctcagctcaggtaaacagcaggagttacctgcaggttgtacctgtgtgagaaccatcagttggagacctgggttcagaaggagatccaagagggtaggttgtcctgtcttgtttgtgagcatggaggcaggtgctcctattttgtttattattatgactcatagaaatgaatcgaatccctttaactcttggcatggaaaaaaggaagggctccggtttgagcaaaggctaccctgggttcttacagagcaccgctgtgagaggtgggacagggtctgggtatctttgggggaggaaggcagggctggtggtgagactgggaaaacctgacatctcttggctggtatctgatcagcaaataccaggggagtctgtttgcaaagattctttgggctgggaaaagtgtgttgaggatatggggaggacggggttaatgggccctgctgagtgtgaggagcaagggtcacagctggaccctccagggttcctgttagcctttgattccatccgggcagggagggagaggtcccccagccccctgaggcaggtttgctttggccagagatctgaaccaaccactggcccagagcaccccgcctccccgctccccctatcaagaggcagctggcttggcccccagcctccttcttcccacctccctcttcccttaccaggccccctccacttggcccaggatacagctctgtttatctgcctgtcccctgtggcattctgtatgctcagagagttcaggatgccctgcaaacatctggcacacagggccactgcctccctcccacatagcagcctctcctcggaatttcagggagcttggcctcctctgtgcctcagtgtctctgaaagtccaagattcttttacttttgtgctcccctctggatgttctcaccactgcccccttgaggaatgtgagtgccctctgggtgacttaataaacagaacatgtgctttttgatgttattgcatcatttagacattcaacaaacatttgttgagcacgtactttatgctatattctgtgcaaggtactagaaagacagttacaatcaaggcaaacaagatccccaccctcattgtcttttctctcagaatctcatgccatttagtcacaaaatccccccatccattcttgaccttgtcctcccaagctcatagtccttagggactccccacttccatttcctcaaactttccccacttctttacctctacttttgctgagtgaggttgagtgggcctggctctgcctcctgcctagatgattctcccaacccaatgacgcgggagcaaaggctgcgcaatggcgtattggaaatcgtattggaaatcactctggattaggctagagggagggcagaggctttcagtgtgggacttgctctacagttaaccagctgtgcgcacttgaataagtcctttacctctcgtcaataaagtagtgggtggagggttggactagctaaggattctcacccttagcttcatgttaacatcccatgcccaggcctcatcttcaggtaccatgtttttaattgatctaaggtggggcttaggcatcagtgttttgttttgtttttcgagactgagtctcactctgtcgcccaggctgcagtgcaatggcacaatctcggctcactgcaacttccacctcccaggttcaggtgattctcctgcctcagcctcctgagtagctgggataacaggcatgcaccaccacacctggctaatttttgtatttttagtaaagacggggtttcaccacgttggccaggctggtctcgaactcctgacctcgtgatccacgcactttggcctcccaaagtgccgggcttacaggcgtgagccactgcgcccagccgcatcggtattttttttaactccccagatgaatcaacaggcagatttgagaaccactgaactatattgtccctaagatctgtagctcatcatagctaacagttagtgagcacttattgtagattgcatgtttgtgtctccccagaatttacagattgaacctctgatgtgatggtattaggaggtggggcacttgggagataattaggtcatgagggtgggattagtgctcttttaagaggaggcatgagagagctttcttcttctctctgctggccatcatgtggggtacacagcaagaaggtggctatctgcaaaccaggaagggacccctcaccagatactggatctgccagcacctggatcttggacttcccagtctccagaactaatgaagacagcatgtagtacttaacttagtcctcacaactctattttacagatgggaaaactgaggcacatagatcctcagcttacccaagtaggggggctgcggttcaaacctggttagtttgtttccagagcctgcacatttaacttccatgctgtaaggacccactgaagcttctcctttgggttcttgtccccaggagtaaatgaccagaactgtctggatgcagtggtgacagtgaggagtgctccagaagataaaggggaagaaaaagtgccaactcttgtgcatctgtgttgagccaggtattgctggctgctggttgctcaccatagcatttagagggtggtgggagcccagagaagggggagatggttctcagttggaagaatcaaaaaggtcttcatggaagaggtggcattctagttgggcctggacagataggtaggatctgactcagagagataaaggagaaggaacaatgtgagcacaggcacagacagcagaagcactctgcacaaggaaggaatatgggcggtactactggaaatagatgttggagccatttcatggagggccttgaatgccagagtaattgccactctaattgctagtgtttcctaaaaaggctctgatgataagaatcacctgggtgcttgttaaaactataaaagaacaggtacatttcttcaagattctgattcatgagggtgggcgtggagagtgggaacctgtattcctaccaccaagcaagtttgagaaatatcgctataaacaatatggagccacttaaagtttttcagcaggggagtaatctcattgaaattgcgttctaggaaggctcatttgatggcagggtgtgtgcctgtacgtggacgggatgttgggctggaagggagagactgatgggggctataggtggtgaaggtctggagcaagacagagaggagacagggatggatgaaaaagatgtttgggaggtagaatttcagtatttggcagctgattggacatcagagtaaggaaggaagccgttggagatggtgggggtggtgaggacgttggtgcaaagttaactaaaataagggtaggggagaaaggagattgggaaataagccgcaagtttgcatgggggcatatgaaggttgaggtgctccaggcagggcttcagatgaaggcacgtggggggtgatagaaatggggactggagcttgggagagggcatgggccatgggaatcccctgcatggaggggaacactgagccaggagagcagaggagatggcccaggcaggggagctagaggacagaggtctgaggatcctgggtagtaacacctatggtagaggaagaggatctggaagatggcaaggtagggaagccagagagatggagaattaggccgagtagaggggccaggaagctgagagaggaacaagttttaaggggcaaaaaactaacagtttcagatttcagatgccagggggaaaggaaagctggtcacttttttttttgtcaactcagaggtcactggtgtgtcctttgggaaaaccatttccatgtcaggttgagtttggaaataaacctgtgaagcgttgaggagtgtggtgaggaagctgaggcagggcgtaggttatcctctcccaaggggattgtgggagatggaaggggaaagaagactgggtaaactgagacagcagatggaggaagcagtgaacagtagagacccatttagaagtctcctctcctttgccactggtcccactgcgcctgtgggccctagctttgatcataatggggcaccatgacacacatgttttcatttcatcttcacaacaatccttaaaaaataatgagatcggtactctagtaattctcactttacagatgatgacactgaggctagagaaagtgagtaacgggattcaggctacacagctggcaaattcaggtctgtgctgtctgcttctgaaatcccagcccccaagctttttacttaattgaaaacacagaagctttatttcttacgcctgagctcctgattggtaacctggctcatcccctgatttccaggttcgttctggccagtcccctttccccagggctatccagttcaggagctgggatccttcatgccagtgctcagggcctcagtaccagctggattccctgtcaccctgccctgctggctggttggacctctacatctttgttgtctcccagctccttctgaggacaataatttgtatggtatagatgcggcccgcaacatggctgaaggcttgtgctgtggagtcagaatgcccggagaagaaatcctaggtctaccactaattggacacatttttttttgagacagggtcttgctgtgttgtccaggctggagtgtagtggtgcaactgtggcttactgcagcctcaccttcctaggctcaagcaaacctcctgcctcagcctcttgagtagctgggactatagttggtgcccaccatgtctggctcgttgtttgtttttttgaaaaatttttagtagtgacagggtcttgctatgttgcccaggctggtctggaacacctaggctcaagcaatcctccggccttggcctcccaaagtgctgggattacaggtgtgagccactgtgcctggcttgggcaaattttttagcttttctgaacttcaattttttttaacagctctaacttatagagtcattttgagaattacagtgcccagtgaaggttagcaattattttatgcccttgatttccaatgtcctggccttcagactgtgatttctttttcagcttgatctgatctccagcgtccttcccgccctacaggacagaactcagcccttcctaggctgcttaggaagccagcctggttgtttcctgaggggtggaaggttcaggttctgaaataagaggaggaactttctatcagctgtagatggaagtgactagtgtatgatggactccagaggaactaacagtgtccactgtggaggtgacatgaccacaagagaggaagggcccagattccttctcttgtcactcggcgtgtcctcacttcctcagtcacacagcaaatgtctgttgagcttctactccttgccaggaaactctgtaggctttggggaaaggcaaaaaagagttaacagtggctttgagaagctcacagccaggatggagaggcagatataaacaagcactgtaattacaatgcagagtgggaaactctaccaaggagctgagaacagggtgcagtgggagcaagggggtgggtcgcgttagcatcaaaactctgggcccccgctctctcccatggccagctcggtcacccccactgttccatctgtttctttgttttttcagagtctttatttctggctttgttttcccttcactttcctaatagagagcctttggaaaaattccacccttgtttcagttggaacagggaaaaggagaattgtctactcttcagccaaaataaccaaggggtgccgggttcctggagagtccaggtggacaagcagaggaagcagggactgtcccgagggagccaggggagagcctgcagcgcggcaggcatggggcagggagaggtgaaaacacaggatgagctgtgcctggctggaaggcccaggtggctgtgtgcctcgagtcctcttccagagctctctctgcatctcctgtcctctgttctgattggaagagagagttgagacttcttccacttcagagaatcctgtaaagcctggttacattgctcttttcccacccaggtagctgtgaagggctgggaccccagagttagaagtgagtctttgacattattcacagcagagggctgtgtatgtgtgtgtctgtgtgtgtgtgtgtgtgtgtgtgtgaaatccctcctttcccctccctctttccccataccaccacacacacaacgctcattgttccctgggccttcaattctgcattcatccattcaacacatatttattgaacactcactatgtgctggaagctggagctgtgtagtggaaaaagttatttcagaaggttgcataggcaccagatatgcatgtgtgtgcctgaatatatgcacatgtatgtatgaatcaatgtgggcaggctagggaaacaggaggaagaagggaagaagaatgtttgggaaactgaagtttgggcatcaggtagcttgcatttgcatctgggtgctaccatttgctagctgtgtgacctcgggtaaattatatgagctttctgtgcttctgtctcccagctgtaaaatagagatactcgtagtattcacctcatggggttgttgtgaaagctgaatgaatgaatgtgcacagagtgtgtgcaacggtgcccagcatgaagtaggtgctctgtaggtattagtaattgttcccttctcaccccactcagagctgggtggagacaaactcgtaaatgactggcagtcacctggtgctacccacctcctgccccctgaggctcatctacaacactcagcccacaaacctctgtctaaccaaaccactgccatctcctgcccttggctgacccccaccccaccctaggctgctcagggtagagaagaagtaatatcacacagtgggggttgcttcagtcccacgctaccctccagacatatatctgagctgtcagttccctcttagcagactgggaatggagaagtgggatgggtgagcatctggggcggagcccaggctcccagcacccacccgatgggactggggaacaaagaacttgtcaggaggtcagaagggagaccgaggggattccagctctgaggaatccatgtgtggcatttgagcgtgggtggcagctggcacgaatccttggttcagaactggcagggccccctcaggagtcagggccaggtcgtgccaaagccccagtggcatcgcggctctgctattcctgaacagctgtgctgctccccttggcatagggttcaagaatgggggcaggagtgtgggcctagccagggaaagaggagggttcagagagtagacacacacacacacacacacacacacacacacacacacacacacagttcaccatgaaggtgcagatgcctggctcagggagaaaagaggggagggagagggtggaaagcgaatgtgtgtgtgtgtgtcgggggggagatggctttgtggttctgtgagtgtgtttggtgtttgggtgtgcataatgtctctgtgtttatctttgtgtgtgcacttctgtttcagtgtgtctctgaatgagtttgttatcagggcgagggtaggtttctgcactacttctgtctctgactctgcttgagcctctcagcaactcagcagagagaatcttcccttctgggagggtgggaaaatatagctcatcagggcagtatgggccaatgctttataaacacacacaaatcacaggacattcttgtgtgtgatccttagctccccacaaagctacggttgatacacatttaaaagagagagagctgagtcctatgtgtatgcttgtgccatttctatatgtctgacagtctgacgagcatgtgtgcttatgtatttgatgtatttgtcactttgtccccacggcagtatctgtgtctacagcttggtgtatactcatgtgtgctaagcccatatttaactgtgtccctagtgacgtttgtctttaagcagcaacataacaggagttagaagcacaggctccacagtgaggcgatccatttcgaatccctgtgtggacagtaactaatgcattaaccttggacaagtttcttaacttttctatgcctcagttttctcacagggataataatagcacatgaggataaatgagatcacatttagtgcctgacacaggtcagcatatgtgaatggtcctgtctttgaacgtgctcctctctgagagctgtctgcttggttgtgactgtggtgtgtcacatctcagctggattataaactgcttttgggcagagcctgggtctcaattatctttaacaatactcatgacacctcagtgtcaccttggtgtcttgtgtatatgtcatcttgaggtgaaatgagacctgtttcatgtgaaacaggacgggtgtcggatgcaggcccatgcctggggtagtacatggagggcaggtgggaagctggtgatggcagtgacaacacagcccagccgggcatcagggtccctcatggtcactactgcatacctgccaggtctctctgcaaacccaggctccctcctccttcgtgtctcagtctggcctggaaactcactgaagggcttccttcctcctttctctgctcaccccaccctcgggcaccagcctaggtgtgtgtttttaatggatgagatgagtgccctccaatctacaccatgcatcgctgttttgcagcttgtgtgtgtttgcccatggctctgtgggggtgtgtttctgggagccgtctttctgtctgatccccgctccattacagtggggacatgtgtctgtgtgtgtgacgtgcctcgtgcctggggtttgttctcctcccccagctttcccagttacataagcagctgaggggtccgtcaggcctgggctgtgggctccctctgctggccgcctctggaacccgcagtctgggttccagaggggcctgggttccagaggggcctgctgaagacactgttctctccttgggccttatcccctctggagggagacaccaacccagttctcaacgccaacctgcccccagctccttcccagccccaggccacagggtaagagaggatacctcacctccctgaagacccctctcatcatactcatactgggggttggttatgacttgtttatgaaatgtatccctaacatatagaactatgttccctgagggcaggggagcaggcccaccttgtttaccatggcatctccagtgcccagtacaaggcctggcccaatcaatatttgttgaatgactgagtttacagggtggagaggcttgggaggagggacagtgaggtgtaggaagatttggggctttggggacagacagacaagcctgggctgaagtcacccctaagccacttaaaaactgtgtggccttgggcaaggtacttaacctgcctaacctcaagtttctcttctgttaaatgacaccaccttgcaaaatatgctataaggactaggactaatatccaaaagggccttcttgtgtaagcatttcataaatgacatctatcattattacaattggtaacatctttcatccctcaagcatcatgaaggcattaaatccactcgataattaaatccattataaagggagagacgtattcttccaaaagcttcccctatgagtttcagttttcacatagctcgatatgcctgtggatggatttagatgatgaggttctggagcaaccttctggatatttcaaagtgggaataaacaggcaccttattgccctgttcatgggccagtgctggcagtcctgggaagtgagggctggacctctgatctcccttcaaggcctcagtttctctggtttctccagggttcctcaatgtggcttctactggcaaccccgtgagcatcttctcagagtcaggcactgtgccacgcttgaggaataccatgtcaaggaaggtctggtctggcctgtgccacttaccctctctgggcctcagtttcctcttctgtaaaggggggtgagtgagtgggagggaagggggatgagaggggagagggaggatgttggagggtagagggtggtaaatgggctctggggtcacctcccactgacagccactctgacagccttggctttgcaaacctggccatctcttctccccattctggtctcatccttcctgcccctgcccacttcccatctttacagttcaggaagagacagagcacctgggaagggtgcctcctccattctcccacctccagggcaagccccactcttcctagaacagagcaatgttcatctcttcccactgtcactgaacatagagactccttcacctaaatgccaggtctaaactaagcctcttaggaagcagttcaaataataattcaaaacctaaaacaaaataatccttatctcccattttgtgttagtttcctgtgccaaacactttatgtacattacctatcatcacaataaccctttgggtgatgtgatcaacctcaattcaatttgcagaggagaaaactgaagttgaaggaggttaaacaactgggctaggatcacccaacccagaaatgacgtcacatggacggccccctctcctaatccatttttcttttggttttgccctctgagggggtgaaaaacaggtctccagtgaccttctggatcctggaagcgcccttcagctcaaacccttcgcattcaggaactcctggcttccgccaacccctacttcagcagggtttgcagcgaggactatggctcagagcaaataactgaattctaaatgcgtggtcacagtcacctcgccaatcccagggaccctgcacccaactctccaggaaaggctggcaggtgcggggtggaatgcgctctgtgcgagggtgggtgggaatttcgatgcgcagaggtgcagttagctcactcctgcgggggcctcgggcggagccagggccaggggcggggcgaggccggggtccagggcggagccaggattggaggctgacgttagccctgcggggacggggaaggggtgcggcttgggactggggcggggccggggcccggggaggagccaggattggagtccgactgtagtcctggtggggcggggcgggggaggggccggaactggggctgggccgaggcccggggcggatccagggctggagtcttggcggggcggagcggggaggggcggggccggggcggggctgggactcgatgcgactcaaaggtgagtttcgaggggcggggcggggccggggccaggtgcggagcaaaggccggagtctggcgggggtggggcaggcagggccaaggctgggtccggggcggggcgggcctagacggggcggtggaaggggcggtgccggggcgggccggggcgagaatggtttcagaactgccgagggctggagggaaagcagcgggaggggcggagggaggggattcggcagctccagttcagctcgctcggcgcacccacgcctcgctgccccgcttcctgccctcaacctgggcatgcgccccccacccttccggccccccagaacccgcgccatcccccggagcctccccagagctggccgcgcaggatgggcgccctcaggcccacgctgctgccgccttcgctgccgctgctgctgctgctaatgctaggtaagccaggcccccgttccggttcccggccctgccgggcaggtgcctgccatccagcacccccctagcatttcggggctcctcacatcctcctccgtcaggggtacctccagcctccccggggtcggcgtccagctgcgctttgtggctgtccgccgagccagtcttgggaagagtgcaggctccccagctctaagccagggactggggcgtagagaggacccactaaggtgctgccccaggcactgctcggcctcccggggcaggccacacatctcagctagcatacccacgtactggggtcgctgcaccaaatgctgcgactcctttctgccccacactcagctccaggcctggccttgggtgcccgccctacgagggcagtgcctgcccagcttcataattgccccagagttggctggaggcccagaggccagttctgcccacgatctttgaagtaagtctctcccagttgcgctccacgcacttcatcaactgggggcagttccctctctcacccccatctccaccctgggttgggtccctctttgcccttcttcctgtctcccaaatggcacttggctctgcagccacccatcagttttcacaccgcttagttccagcttccttgcctcaggagaaaccaggttccatggagactgatcctgggatctccaagcaccttgtgcctgctgtggtgggtgttcatggtggggtgttctgggccaatcttgcatggatgcatggggataatgacagtggaattgtttttggcctgaactggagggctccctgtaggaggtggtctggggaagagtatggcatggagacagtgaaactgccagtacagatgttgatgaggctgaagcccttgaaatgagagtgaagcgtgggggtggggatggtgacttcagagctgctgtcgtcaaggcagaggctgaaggtagccccagctgcctgtttctagaccagagctccacagtggcaccaagcaaagccttcccctgctgcaggtccctgggccctgcagggttaggatgagtcctctccctggtccctgggcaggtggcaggaggatgtacagagaggaaggcgctgtggggcctgggttgcctagcacttggtgtgttttccccagtgggcagcatggagcagggaggagcccagggaggtggggaagtgctggcctgtgtttgaaaaaggagcacgcagaggtctgagcacccactgcctgtgggcacttacattcatttcacaaatgaggaaaatgaagtaacttgccccagagagcacatttagtgagtgttggggctaggatttgaacacagatctgattccaaagcaggcctctttgctgtccctttccttgctgcgactgatacagaggaggggagagagagctgtgtggcaactgatttcctaaggctgtggaggtgactttcccatgggcatctccaagcatcagcagttgtggagccaggaaaatgggagggggccttctgagcagtctgccctgaggcagtcagggaaggtgtcagcttggctgtctccaccgtcactctgattatgaaacttgcctggcctggggcagggctctcctgagtcacatacgcactcacacatggtcagagctggagctcttagttctcctccagtgtggaaactgaggcctaggacagaaagagactggatcccaggccacacagctgggcatggggatggtgctggaatcccacttcctgactggcagctgtgcccttaacaacagaccatgagttctccctgtgacccagccagaggatgaaggaaggggctaggagcccagaagcaggggtggggaagttcagaggagccgttctagagaagctggagggtagagtttgaccacagactcctgggcattttcctctagctcctgcagaaagtccatggtatccccctgggaggcctaaaagtgacactctggttggtgaggtcagtcccttcaggcctggccttggagtttccccatcttcctctctggttttgcccctctggaggagtgtgtggaagccatctagggacagcatgatcttggctaacatattatacttttcctgccttacctttctcatctgtaaaattgggagaggtggggaggggtggcctagccctctttacattgaggttctgtgatcttatctagtgggagctatggaaggaaagaagggaggagctaagccctctaagtctgccaggagtatctgctggggtagggttgggcataggggtggagtagggtgaagaagagaggtttggcctttctgaagggagagagatgagaaggggcagctggggatttagtgcctccctacagaaagagagccatatatgtaaatgaatgcataccatgtgcaaatgaaggcttttgttaaggaactggggcaggcaccttctgtatctgctgggctagcccggaaggttggcaggcactggaggaggggatcttctgcccccaatggccagggcagagcctggatcttgccccagaagccccagctgcctgggcagccctgtggggtgagagaagcagtgagctcatggcgcagctggagaggggagggcattgtgtggtgagaactgactgggcctgtgccctttccagctagggtcactggctccattgtctcgcccaggtgacacagctgagccaactagcacttctgagcaagactgccagctcccctcaagcaaaggagagggacatgtagtctcagagtcccctagccagaaggctccccttgccaggtgctgaggaaggaatggcagacatggaggtgggtgagtggcagggacagatcaaggttcagttggaaccaaggcctggttaggtcaggaatcagatgtactcctttctgccttcaggtgctctgcttctagtccgccagaaatgggatgcatctggatgccaaggcaatcctgggcccatgccacctccttgagatccaggtgtcttatatcacagcatccctttcctattctcagaacagggtccaagctgtggacaagctttcccaggtctcctttccttttgtaggcagagatcaagaatggtgcttgtggcggcagagggcatggaatgaggaaccaggcatctccaactccttctgcctttccctacaggaatgggatgctgggcccgggaggtgctggtccccgaggggcccttgtaccgcgtggctggcacagctgtctccatctcctgcaatgtgaccggctatgagggccctgcccagcagaacttcgagtggttcctgtataggcccgaggccccagatactgcactgggcattgtcagtaccaaggatacccagttctcctatgctgtcttcaagtcccgagtggtggcgggtgaggtgcaggtgcagcgcctacaaggtgatgccgtggtgctcaagattgcccgcctgcaggcccaggatgccggcatttatgagtgccacaccccctccactgatacccgctacctgggcagctacagcggcaaggtggagctgagaggtactgggccctgggacggggtggagccacacaccctctcaaggcagaaagtcaaggccacaagtgacctatctagttgccccttaggttttgtagccaaggaacttgaggcccaaagaggttaagtgatttgcacaaagtcacccaataactcagtggctgatgtgggactcaaacccagagttcctcacccaggccagtgctcatcttatcatattaagacccctcctgggagaagaaatgtccttaagttgtccagtccactttccattcccaagaacgaagaagactgttgggttgaatagcctctactcctggacagtacaggacccagatctgggaaagagagtagagttagggaaggagttagaccatgtgacattctcactctcttaagtttctttgtcttctgagaagaaagagccgcttttctcagtatttcaaacagaggtcagtctcaaacataagggtgagtaggcgatgggctggttctatgaaattctacaagtatttattgagcgcctgtgctgtgcccagtactgcccttggcaccactgagttacagaagaaataatacaacatgcgatctttgccctctgggagctcacagtttatttagggagataggctatacacaggaaacagtaacaagggctgccagctcccagccctccctcactccagctgttctctccagttcttccagatgtcctccaggtgtctgctgcccccccagggccccgaggccgccaggccccaacctcacccccacgcatgacggtgcatgaggggcaggagctggcactgggctgcctggcgaggacaagcacacagaagcacacacacctggcagtgtcctttgggcgatctgtgcccgaggcaccagttgggcggtcaactctgcaggaagtggtgggaatccggtcagacttggccgtggaggctggagctccctatgctgagcgattggctgcaggggagcttcgtctgggcaaggaagggaccgatcggtaccgcatggtagtagggggtgcccaggcaggggacgcaggcacctaccactgcactgccgctgagtggattcaggatcctgatggcagctgggcccagattgcagagaaaagggccgtcctggcccacgtggatgtgcagacgctgtgtaagtgccacttatacatcccactgtgggagctgggagggacagtatcctggtgggcactgtggccacagggggtaccagatagccatcatctgactccaaggaactcatcttccacagagtgagcagccttgctagcatttctctcccccggcccttgatgggttttctctgctcagaaattgggtatagagataggaggcccatgctgaggggtgagattcaagcccctaaatagaaagatggtcatacctagtgagggggagacaggaggttttgaagttgctgctgtcaagtaggaaacaggaagttggggaatcgggtgcctctgtgtcccctcctgcctccatgacacctcttcccctacctgtgtttcagccagccagctggcagtgacagtggggcctggtgaacgtcggatcggcccaggggagcccttggaactgctgtgcaatgtgtcaggggcacttcccccagcaggccgtcatgctgcatactctgtaggttgggagatggcacctgcgggggcacctgggcccggccgcctggtagcccagctggacacagagggtgtgggcagcctgggccctggctatgagggccgacacattgccatggagaaggtggcatccagaacataccggctacggctagaggctgccaggcctggtgatgcgggcacctaccgctgcctcgccaaagcctatgttcgagggtctgggacccggcttcgtgaagcagccagtgcccgttcccggcctctccctgtacatgtgcgggaggaaggtgagagggggctgggccctggacggggttcgaggattgtcaaccccttttccttctgtttccatgacccctccctctccgtcagctgtttgcaggccacagcctcacgctcctcttctaccaagattgtgggaataccctgagtttcctggggcggtgcttggcggcagccctaaccccatgctccctggccctgcaccctctgaccccatgtcctttgttctgcaggtgtggtgctggaggctgtggcatggctagcaggaggcacagtgtaccgcggggagactgcctccctgctgtgcaacatctctgtgcggggtggccccccaggactgcggctggccgccagctggtgggtggagcgaccagaggacggagagctcagctctgtccctgcccagctggtgggtggcgtaggccaggatggtgtggcagagctgggagtccggcctggaggaggccctgtcagcgtagagctggtggggccccgaagccatcggctgagactacacagcttggggcccgaggatgaaggcgtgtaccactgtgcccccagcgcctgggtgcagcatgccgactacagctggtaccaggcgggcagtgcccgctcagggcctgttacagtctacccctacatgcatggtgagtgacaccccctccaccctcctcactctgccttcctcctggcctctgccactggccttcccttcccatcttctgaccctcctgctactatctctctcctccacattatgtcacatgaagtctcaaaaaatccaacttccagccctgcagtgcccacctgcacggggtcctctgtggttgatgctgacttgcatgctgagggggcaggctgtgggcagggatgggggtgtctgtgaatggagaaggtgggttcagagaacttgatggggaaagcgcagaggcaagtgtatgggtggaggatgatggcatcctctctgaacagtcatcctctctcccccagccctggacaccctatttgtgcctctgctggtgggtacaggggtggccctagtcactggtgccactgtccttggtaccatcacttgctgcttcatgaagaggcttcgaaaacggtgatcccttactccccaggtgagggaaaagaaccccccaaccttgttttcattgggcttcccacccccaagtcctgaaccaagctgctccctcccaggccccacctggaggaggagtaggcagctcagatccacagggccctgttaaggggtggaggccgcgagggagccccactcagggctctctgtccttagcccacaccgggcacccttttcaggtcttgcaggtgtcgactgtcttccggcccagctccaagccctcctctggttgcctggacaccctctccctctgtccactcttcctttaatttatttgacctcccactacccagaatgggagacgtgcctccccttccccactccttccctcccaagcccctccctctggccttctgttcttgatctcttagggatcctatagggaggccatttcctgtcctggaattagtttttctaaaatgtgaataaacttgttttataaaaagcaggcttggctgtgtcttccctaccatgagactgtaaaacgctcagggtgcatagtagggaggtggttggggattgacaacctattctggatgacccaggcctctcttcccaccacaaacaccatctggcctccatgggccatgccacccaccccaggaggggacacctgggttccatctgcagcctgaactgtcggggctgagacaactcctgattggactcctacttggggagggaagcatagaaaaggagggtaggttccagctgcctgtggtcacccccgcaccagcttctcccatgttaaagggcatgggcctccaggggcagtgccttttctgagcttcccagactttccccaactcttcccacgtctcattctcctggtcaggctagtcttggacctgactcctcccactaggccctggggctgaaattgttgttccttctgacccatagcagcagaatagaagcctcagaacacaactgatactcaggctgggacaacaggcagtcaggggagggcctgtgtgtccacagagccattgcacccacatgtactcgctgtacctgcatataccctctacccgcatatacccactacacctgcatatacccgcttcacctgcctgtacctaccctggggtctcctccctcccacccttcagcttcacccctcctccagtgccccaggagtttcatgaattttcttgcctaaggattctctgatcctaaaattcttacctgcacggcaccttaagaggcatctggcaggcctccttcagttgttatttaaacatttattgagcattacgagtttgctgtcatttttacagatgaggaaactgaggcccagatatgcgatttgcccagagtcatagagctaattagcaagtgtcaggagtaggacctaggtctcctgacttgttgcactgtacagtggtgccctgagtggtgacagtggcgaggagaggtgtggcagggtctcagtgacttcagcaggcaggaggggcctttccagactgagtttctctgcttgttcagctgcaatgggttggctcctgtgtgagtgcgtgtgtgtggataccaagtagcccacccgctcttgtccagacccccctgttttactgaaacccaaatgaatccccattctccatcccaacatctgttcttaggggaccagtcaatgccaggcttcaggaatctcatctttgatgacagggccccagtggccctgtgacctgaggcaaagatatccgtgttttgactgaaaggaagggactgggacttgggtcctctctgagtgaaccccagctgtctgggctgcttccatggccccctttcttgcttccagaggacccatagggccctggctatgcccataggaccctggctgtgccccataggaccctatctgcccagcctggaacagagaagactggagtgctttccccagggggcttatgaaagggcaggagtgggatgtggccagggccaagggaggaggtccttgctgggccagtgctgctgtgtgggagacaggcgctgtcccagggcaggctctcctgggcctatgcttttctccaggccagcttcaggtcccttccacccctctgcctctctcaacttgcagttgttctccctcactatccaggaagctgccgctggtgactgggatgtgatcaggaagcaggtggaggtggggtgagaatatgcgtctttgggaccccctggcccaattgggctgacagcaggctgcagacacatccagatgttctaactcctatcgcttctctccgattttctcccacattcaatcttgcctccagtcctacaaggggttctgtcctttgcccctaaaactcttcctgctccacctccccccgacctccccaggagccccctcaagtccttctgatggcttcatctctctgtcgggcctgctcagcttccagacaccccctccacttgtcactgccctgtttccattgatggttgagtttctgggcccaaagttaaactcttcagcctgggcttcgggtccctttcccacacataaaaccccacccttcacatttctctgtctgctcctgtgaggatcctcagcttcttctcagcttctcttcatcttcctctcagctactcctcagtttctatgccccatgtcctgaaacgacttccaagtattcacttagagcacaggttctcaaagtgtggtcctcagtccagcaacagcagcatgacctggggacttcttaggaatgcatggttttggtccccacctcttgggtcagaaacccttggagtggagcccaaaaatctgtgttttaccaagccctccaggtgattccaacgcacactggagatttctaactcctgacttacatattccctatgccttacactggccccagccttctgatcacccacactcccctaccctccacgggactgcacaggttgtcagtttgaattatccctcgttcagtcaccacaggtagattcctctgttttcccaggtgccccttattttgaggacaggaaccaggtttttgaatgtccactccacatggcacccaatcagtgatgtgaatgactgtgccccaaggacacactgctttcctaggggctccctgtttcccagctctagtgaacccactttctagatctctctcctggcccttcctccccagaacctctctctctctcttcctgcctgtgcctgatacctgtaagatctcactccactgtaagaaaatagctatccctggttttcctttcccaggcccctctccaggccccagctcaggcacctccccgctctgcctgcttccctgaacttgcggactaaggtcattcacaccttgctgagccccttgcacgccttcatcctggtgagggtggagctaggagggcaccctcctcatgtgcccatcttggtccggctcctttctccttcacttcagcttggcctaccgtgtcattagacagttgtgccatatgtggggaggctggcagaagaggtgactggggactgcaatccatcctatactctgctccccaagccatgcaccctggtttggggctgtatctgtctggaggaaaagggttcctttttaaaatttgcacaggggtgttctacaggttagtggcagccctgagtggaccagttgtctactggtccatctatgtatctgtcagctgtctttatctgctaccatcttcccatccaacccccaaaagtccatcattctgtccatccatccactcatgaacaaatgtgaaggtcaaacacagactggcattttcacccggccccaccctccatttccctgaaatcaggacccctcccttccatactggtttctagacttgaggttctgggggacggggactttccaactttagcacatttccaggggctttgccttcctcctcctcctcctcctccaccacctccgatatgcagttccccatgtatctgtgtctggcccccggtctgccacaggggtctggaggaagctggtcacaccttggactcactctctgggggtggcaggcagccattctgctccttgtcagccccagcttccccacccgccccctcccccgccccctcctcctccaccttctcatccagccggctggggatggaccagtagagatgggcatcaaggcgggcggcagcctctgccagctctcgagcactgcacgaaggtgtgggcacctcaaaagtctcgtgaaagctggcatagtccacttcgtagaagccgtcctccagagtcagcactgacgtgaagcggtggccccacagcacctcgtctaccaggtaggagctccgagcttggcatgtcattcctgggaggaggggcaccggtcagggggaatctcagctccaggcttccctctcctcttctcattccacaaccctactcccagcaccctcccttctattccttcctaagggctcccacctccctttggtccagtccatttccccccctccctagctcctgttcttacccagctccctcgtgtcttctccatttgccccaactcctcttaatgtccagctcttttttcccctcctgtcatttggtgatgccaaccaaaaaaagcttaaccttgaaactaaccttagggatcctctagtccaacttctcactccatacagggctccccaaaggagcatttctaacaatgggcatctagcttatacttgattacctcccaggattgatagctcaccacttcataaagggcccactcctttgtatgatagctctaatagttgggttgttctttatacagagctaaaacctgtaccctgggatttccaactcttggcttcattcccctcccacttcacagtcctctgagtatctgaaaacaggagtctcagattccctcatgttttctctcttgacttaacatccctggcttcctccacgattcctcatttgacctggttttccagaactctacttttttgattacaagccagaatggccaaggagggccctttaagcattttgagtatagtaaattttccaactgtggcctgctccgtgcataagagagcgcgcaccatctctctcttctggccatgatgctttcactaatagggcccaggataacattacataatcattttggaggctgcatcacattgctacgacatcaagactgtagccaactaaaactcccagttcttttttcaccagtgctcttccatgctgtgcttacataagtgatttttttaaagcctaaatgtagaattttatatttattcattttaaatgtcatcttgctgggttttggctcattattcttgcttttcaaaagcgttttgaatcctgactgtctcacccaaaatattaccatcctttccagctttatctctctagaaaaacagacagattcctatcctcatctcctctgtcctggtcctccctgcccggggcttgtgtcctatcttcctgttgggctggtgcacccctcagggcaggtcattctcctttctgccacagggtcttgcccccaacccatatccatctcggaacaaggggaaacagaagagtgaacattagctaaccggagagtggctgtcaactcggaaagcctggcgctgagacattggtattcctcggtgaagttggaatagaaagtatccagtgggagagaagagaaagaggcataagggacactggggagagaagggcttcgaggaggagagggcagggctgggggtacaaagagaaaagagggccgggcagcaacttccctggagggtgaggggcctgcctgagatactggcagaaaaggagtgacagctggagagagaggaaagggaacggggtgagtgggggaagaggaaagagtcggggtgaagcaggaatgggaacagtgatgcggagctggggttggggtgtgaagcggagtctcagcctaaaggggccagggaaaggatctgaaggcaccagcttgtcagcgaagccggcagggagcatcagcagctctggcgtcagaggagggactgcggcgccccctagtgggcctttggtcctccacccgcagtttcctcatcctcatctatcctctagatctcaagtcctaagtgacctcctttgcgactcctgtaacactggtcttttttcacctgctcccaaagccttcactgtgtaggtctgggttggacttattgacatcacagatgagttgccagttccttttggaaaagagctagaaaaggtaacatcatctatatcccttgtcagtggaaatggatgaattgggaaaccgaggtacaagtgagactaggtattaaactcccctcaagatccggcctagaaataactcaggcaatggaaaaccttcaccgtcaaattccaggggcctgaacctgactgcagtgagaaaacccctgaacctaacccctccttccaactcgggaccactaaacattgaagccacattgcctgtgtccaatccaggcatggccacttattggcttaggaaagtggacaacttccttaatttctcattggagcaatctcatctctaaaaagtgagcacaataacaagaagttaccttcagagggttcttgttaggattaaatcgactcagaggtagaaagtgctttggaactgcgcatgacacagggtgaatactgggcgagcactagctattattactgtccctattccaagtgacacattcctctgggcccagggccccacgccagtgccatttcggagaattcctccaagctttctcttggccttctgcggcgttgctcggttccactcccgcctccgacccctgtctcacctcactgtctcatcctccaccagcccctccatccatcctccccagctcccctggcccctagtctcgcccctgccttcctcggtcccgcccaccctctgccaaccccgctcccctccccaggcctgctcgcacccgtggcttccaccatgccctcgaggataacgacgatctcgaagtcgtccctctcgagggcacggcgcgacgcctcccagaaggggctggcggcgtcgatctcgtggctgataaccagcggcgagacgaggaagaggcggtcgtctcccgtgtcgaagcccacgctgaggtcggtctggtgcagcgggatgaactcgccctccagcgtctggcgcgagcggatgagcttggcgcggatggaggcctccactatgtgtgaggagcgcaagtcgcccacgcggaacatgaggcagaggcgcccgtcgcgcagcgacaccacggcgtgcgaggagaagacgagcgtggctgcgcgcttgttgggctgcgagatcttgacgaacatgcagcccaccatgaaggcgttcaccatggagcccaggatggcctgcagcagcagcagcacgatgccctcggggcactggtcggtgatgacgcggtgcccgtagccgatggtggtctcggtctcgatggagaagaggaaggcggccacgaagccgttgaggttgttgacgcacggcgtccacgcggtgtcctccaggtgctccaggtcgccgcggccgtaggcgatcagccaccagatggcgccgaagaagagccaggtgagcgcgtaggccaggacgaagaacaacaggctgaggcgccactgcaggtccaccagcgtggtgaacaggtccgtcaggtagcggtatgtctcgcgcacgttgccctgctgcacgttgcaccggccatccttctccacgtagcgctggcggccgcggcgccgcggcggctcctcctgcccgggcgagaaggccgcgttctcctgcgccatggcggccgcgtcagggcgagcgctgcgggcgcctggagtgcggcgggggcccgagctgctgccacctgccgcgcgtcgctgggcgcctaggcggcgtcgggggtcctggaggggcttaataaaggtttgccgaatgagtggcccctcgggagatggggaggcacggggcatcagggccagcaccgagccctggggggccctgggcgagtcccttcgtgttgcctggcctctatttctgggaataacacattcagccctaactgccccccaggctcagaaagttgtgagggtcaaatggaatgatgtacctgaactggatagaactgtgcaagttccacgatgattttcaggggaaggaggtaccagatattttggtgccatcacctccagctggggtgtgcagcacctcaggggcagccccggggccaaagacccaggcccagatccccctagtgatttcctgaaatcaatagactgggggctttttggggaggggggcaggcgggtaatggagccctccctgccctaaggacttccaccatcccttccccagctgtagccagtgcagccaccaatggctctcctcgcaggctgttttgaagttcaccccaagactgatacacagtctttctcattcttccctccttggacctcactcactccgctccattccctcccctcaacatgcttacaaacgagaaagaaatgaaagctgtggaaagtcagtggaaaccctccagtgcacaagggtggaacattaggaaattcccactagaaatcctccctgagacctacccacgatcactgctgctcttgggccagcctcatttcccttgggttttttctcctagtggagacagcctgcaaatggggaggggaactggaagatcccaacacagaagcctgggaaaggaagcccagagttataaagagttaggctcgtatccctctgggatcctattcttcatgagagacatggaatcagatcaggtgaagcactaagcacccacatttatttccccactccctctagttatattttcccccagcctcttacttcccatggactatcctaacaccagccccgcccccacctgccatatgccccaaagcccacattccaagcgaagcccacctgatttttcttcacatgcttgcctctgaggagctctctgagctgcaatctgctctgagagaggtccagagcccttccccaaagcacccagggtcctctaggagatatggaccatacagggaaaggtttagaataggatttgggactcttccaccttcccttctctttcctgggaatgatcctctcctcccactccacggaaacgtgggctggctagtgggtgggggatggaggagtgtgccataggaaccacagatggcctggatggttgaccaggtcctggggagaaactgcctgggtatgtgactctaaacctagcactccagcatcttatgttctggggtgaggtcctctgcagtcagcactctggagagggtgtgtgtgtgtgtgtttgtgtgtcttggggtagagaaggtaggaagagaaatcaaaatgaaatggctttgagcttaggggcaccccctgcatttattgtccatggagtcaggggacacagggtccaagagccccatggcaatggaagattagggtttcccctgcccccaacaatgggcttccttttcctttcctgaagctcagatgtcctcaggaagagtaagcattgactggctcagagaccccaggtcatgcagaaaacgaccctgctcccattatcctagctttagtcccaggtgggcttccagatgttctctcagggtcttaggtaatctgacccccagtcggcttgcctagacagatctctctgcccagggatggggaaggaaccccgatgtcggatcacccccagaactctctcactctccattgccccagggatctaggtaaaccttattttgaatgtgtcccacatcctgtcttcctgagtgggggactgcacttttctcaggggaaggaaaagtgtgaaattgttacctctatctcaagatcaaggacttgatttctccatcttccctccaagaatttcagttcctccaacctactcctcatttcttgtgcatgctatgacccctttgcagaagattgcaataccacttttcctgggcccctcttcctccctctagagagctggggagtaagggggctcattttttggaaggagagacctggtgaaaactcccccaagaaccagctcctcccaaacccccacttgccttggaaataggggcccaaaccccaagtcccccgcaactcaactcacagcacgtggagaggagagtagccggcagcagagacccctggggggtggcgtccatgcccctgacaccgccccccccacgggccccccgaagggtgggagccgcagacaccgctgtttctcctaaatgtagcggcagctctgactaggacttgctatctgtgtcatccctacttcccaggctcccctgctcctctcttgtttccacggcaaccagtctggcgacagctccagagcatccccctcccctccccagtcctgggtaccactaggggttgatccaaaccacacgccatagctatttttagccaaagtccctcctcctggacaactcagagcttggctcctcaccccctcata

SEQ ID NO: 840 - DNA, 2337 bp, Homo sapiens
gggccggggcgagaatggtttcagaactgccgagggctggagggaaagcagcgggaggggcggagggaggggattcggcagctccagttcagctcgctcggcgcacccacgcctcgctgccccgcttcctgccctcaacctgggcatgcgccccccacccttccggccccccagaacccgcgccatcccccggagcctccccagagctggccgcgcaggatgggcgccctcaggcccacgctgctgccgccttcgctgccgctgctgctgctgctaatgctaggaatgggatgctgggcccgggaggtgctggtccccgaggggcccttgtaccgcgtggctggcacagctgtctccatctcctgcaatgtgaccggctatgagggccctgcccagcagaacttcgagtggttcctgtataggcccgaggccccagatactgcactgggcattgtcagtaccaaggatacccagttctcctatgctgtcttcaagtcccgagtggtggcgggtgaggtgcaggtgcagcgcctacaaggtgatgccgtggtgctcaagattgcccgcctgcaggcccaggatgccggcatttatgagtgccacaccccctccactgatacccgctacctgggcagctacagcggcaaggtggagctgagagttcttccagatgtcctccaggtgtctgctgcccccccagggccccgaggccgccaggccccaacctcacccccacgcatgacggtgcatgaggggcaggagctggcactgggctgcctggcgaggacaagcacacagaagcacacacacctggcagtgtcctttgggcgatctgtgcccgaggcaccagttgggcggtcaactctgcaggaagtggtgggaatccggtcagacttggccgtggaggctggagctccctatgctgagcgattggctgcaggggagcttcgtctgggcaaggaagggaccgatcggtaccgcatggtagtagggggtgcccaggcaggggacgcaggcacctaccactgcactgccgctgagtggattcaggatcctgatggcagctgggcccagattgcagagaaaagggccgtcctggcccacgtggatgtgcagacgctgtccagccagctggcagtgacagtggggcctggtgaacgtcggatcggcccaggggagcccttggaactgctgtgcaatgtgtcaggggcacttcccccagcaggccgtcatgctgcatactctgtaggttgggagatggcacctgcgggggcacctgggcccggccgcctggtagcccagctggacacagagggtgtgggcagcctgggccctggctatgagggccgacacattgccatggagaaggtggcatccagaacataccggctacggctagaggctgccaggcctggtgatgcgggcacctaccgctgcctcgccaaagcctatgttcgagggtctgggacccggcttcgtgaagcagccagtgcccgttcccggcctctccctgtacatgtgcgggaggaaggtgtggtgctggaggctgtggcatggctagcaggaggcacagtgtaccgcggggagactgcctccctgctgtgcaacatctctgtgcggggtggccccccaggactgcggctggccgccagctggtgggtggagcgaccagaggacggagagctcagctctgtccctgcccagctggtgggtggcgtaggccaggatggtgtggcagagctgggagtccggcctggaggaggccctgtcagcgtagagctggtggggccccgaagccatcggctgagactacacagcttggggcccgaggatgaaggcgtgtaccactgtgcccccagcgcctgggtgcagcatgccgactacagctggtaccaggcgggcagtgcccgctcagggcctgttacagtctacccctacatgcatgccctggacaccctatttgtgcctctgctggtgggtacaggggtggccctagtcactggtgccactgtccttggtaccatcacttgctgcttcatgaagaggcttcgaaaacggtgatcccttactccccaggtcttgcaggtgtcgactgtcttccggcccagctccaagccctcctctggttgcctggacaccctctccctctgtccactcttcctttaatttatttgacctcccactacccagaatgggagacgtgcctccccttccccactccttccctcccaagcccctccctctggccttctgttcttgatctcttagggatcctatagggaggccatttcctgtcctggaattagtttttctaaaatgtgaataaacttgttttat

SEQ ID NO: 841 - protein, 607 aa, Homo sapiens
MGALRPTLLPPSLPLLLLLMLGMGCWAREVLVPEGPLYRVAGTAVSISCNVTGYEGPAQQNFEWFLYRPEAPDTALGIVSTKDTQFSYAVFKSRVVAGEVQVQRLQGDAVVLKIARLQAQDAGIYECHTPSTDTRYLGSYSGKVELRVLPDVLQVSAAPPGPRGRQAPTSPPRMTVHEGQELALGCLARTSTQKHTHLAVSFGRSVPEAPVGRSTLQEVVGIRSDLAVEAGAPYAERLAAGELRLGKEGTDRYRMVVGGAQAGDAGTYHCTAAEWIQDPDGSWAQIAEKRAVLAHVDVQTLSSQLAVTVGPGERRIGPGEPLELLCNVSGALPPAGRHAAYSVGWEMAPAGAPGPGRLVAQLDTEGVGSLGPGYEGRHIAMEKVASRYLRLEAARPGDAGYCLAKAYVRGSGTRLREAASARSRPLPVHVREEGVVLEAVAWLAGGTVYRGETASLLCNISVRGGPPGLRLAASWWVERPEDGELSSVPAQLVGGVGQDGVAELGVRPGGGPVSVELVGPRSHRLRLHSLGPEDEGVYHCAPSAWVQHADYSWYQAGSARSGPVTVYPYMHALDTLFVPLLVGTGVVTGATVLGTITCCFMKRLRKR

SEQ ID NO: 842 - DNA, 2628 bp, Homo sapiens
gctcatccagttccttctccttctgtttcttcttgccgcccccattctctgccgtggtggcggcagggttcctcaatgtggcttctactggcaaccccgtgagcatcttctcagagtcaggcactgtgccacgcttgaggaataccatgtcaaggaaggtctggtctggcctgtgccacttaccctctctgggcctcagtttcctcttctgtaaagggggggggtgaaaaacaggtctccagtgaccttctggatcctggaagcgcccttcagctcaaacccttcgcattcaggaactcctggcttccgccaacccctacttcagcagggtttgcagcgaggactatggctcagagcaaataactgaattctaaatgcgtggtcacagtcacctcgccaatcccagggaccctgcacccaactctccaggaaaggctggcagaacccgcgccatcccccggagcctccccagagctggccgcgcaggatgggcgccctcaggcccacgctgctgccgccttcgctgccgctgctgctgctgctaatgctaggaatgggatgctgggcccgggaggtgctggtccccgaggggcccttgtaccgcgtggctggcacagctgtctccatctcctgcaatgtgaccggctatgagggccctgcccagcagaacttcgagtggttcctgtataggcccgaggccccagatactgcactgggcattgtcagtaccaaggatacccagttctcctatgctgtcttcaagtcccgagtggtggcgggtgaggtgcaggtgcagcgcctacaaggtgatgccgtggtgctcaagattgcccgcctgcaggcccaggatgccggcatttatgagtgccacaccccctccactgatacccgctacctgggcagctacagcggcaaggtggagctgagagttcttccagatgtcctccaggtgtctgctgcccccccagggccccgaggccgccaggccccaacctcacccccacgcatgacggtgcatgaggggcaggagctggcactgggctgcctggcgaggacaagcacacagaagcacacacacctggcagtgtcctttgggcgatctgtgcccgaggcaccagttgggcggtcaactctgcaggaagtggtgggaatccggtcagacttggccgtggaggctggagctccctatgctgagcgattggctgcaggggagcttcgtctgggcaaggaagggaccgatcggtaccgcatggtagtagggggtgcccaggcaggggacgcaggcacctaccactgcactgccgctgagtggattcaggatcctgatggcagctgggcccagattgcagagaaaagggccgtcctggcccacgtggatgtgcagacgctgtccagccagctggcagtgacagtggggcctggtgaacgtcggatcggcccaggggagcccttggaactgctgtgcaatgtgtcaggggcacttcccccagcaggccgtcatgctgcatactctgtaggttgggagatggcacctgcgggggcacctgggcccggccgcctggtagcccagctggacacagagggtgtgggcagcctgggccctggctatgagggccgacacattgccatggagaaggtggcatccagaacataccggctacggctagaggctgccaggcctggtgatgcgggcacctaccgctgcctcgccaaagcctatgttcgagggtctgggacccggcttcgtgaagcagccagtgcccgttcccggcctctccctgtacatgtgcgggaggaaggtgtggtgctggaggctgtggcatggctagcaggaggcacagtgtaccgcggggagactgcctccctgctgtgcaacatctctgtgcggggtggccccccaggactgcggctggccgccagctggtgggtggagcgaccagaggacggagagctcagctctgtccctgcccagctggtgggtggcgtaggccaggatggtgtggcagagctgggagtccggcctggaggaggccctgtcagcgtagagctggtggggccccgaagccatcggctgagactacacagcttggggcccgaggatgaaggcgtgtaccactgtgcccccagcgcctgggtgcagcatgccgactacagctggtaccaggcgggcagtgcccgctcagggcctgttacagtctacccctacatgcatgccctggacaccctatttgtgcctctgctggtgggtacaggggtggccctagtcactggtgccactgtccttggtaccatcacttgctgcttcatgaagaggcttcgaaaacggtgatcccttactccccagcccacaccgggcacccttttcaggtcttgcaggtgtcgactgtcttccggcccagctccaagccctcctctggttgcctggacaccctctccctctgtccactcttcctttaatttatttgacctcccactacccagaatgggagacgtgcctccccttccccactccttccctcccaagcccctccctctggccttctgttcttgatctcttagggatcctatagggaggccatttcctgtcctggaattagtttttctaaaatgtgaataaacttgttttat

SEQ ID NO: 843 - protein, 607 aa, Homo sapiens; identical to SEQ ID NO: 841

SEQ ID NO: 844 - DNA, 2458 bp, Homo sapiens
gctcatccagttccttctccttctgtttcttcttgccgcccccattctctgccgtggtggcggcagggttcctcaatgtggcttctactggcaaccccgtgagcatcttctcagagtcaggcactgtgccacgcttgaggaataccatgtcaaggaaggtctggtctggcctgtgccacttaccctctctgggcctcagtttcctcttctgtaaagggggggggtgaaaaacaggtctccagtgaccttctggatcctggaagcgcccttcagctcaaacccttcgcattcaggaactcctggcttccgccaacccctacttcagcagggtttgcagcgaggactatggctcagagcaaataactgaattctaaatgcgtggtcacagtcacctcgccaatcccagggaccctgcacccaactctccaggaaaggctggcagaacccgcgccatcccccggagcctccccagagctggccgcgcaggatgggcgccctcaggcccacgctgctgccgccttcgctgccgctgctgctgctgctaatgctaggaatgggatgctgggcccgggaggtgctggtccccgaggggcccttgtaccgcgtggctggcacagctgtctccatctcctgcaatgtgaccggctatgagggccctgcccagcagaacttcgagtggttcctgtataggcccgaggccccagatactgcactgggcattgtcagtaccaaggatacccagttctcctatgctgtcttcaagtcccgagtggtggcgggtgaggtgcaggtgcagcgcctacaaggtgatgccgtggtgctcaagattgcccgcctgcaggcccaggatgccggcatttatgagtgccacaccccctccactgatacccgctacctgggcagctacagcggcaaggtggagctgagagttcttccagatgtcctccaggtgtctgctgcccccccagggccccgaggccgccaggccccaacctcacccccacgcatgacggtgcatgaggggcaggagctggcactgggctgcctggcgaggacaagcacacagaagcacacacacctggcagtgtcctttgggcgatctgtgcccgaggcaccagttgggcggtcaactctgcaggaagtggtgggaatccggtcagacttggccgtggaggctggagctccctatgctgagcgattggctgcaggggagcttcgtctgggcaaggaagggaccgatcgtggggcctggtgaacgtcggatcggcccaggggagcccttggaactgctgtgcaatgtgtcaggggcacttcccccagcaggccgtcatgctgcatactctgtaggttgggagatggcacctgcgggggcacctgggcccggccgcctggtagcccagctggacacagagggtgtgggcagcctgggccctggctatgagggccgacacattgccatggagaaggtggcatccagaacataccggctacggctagaggctgccaggcctggtgatgcgggcacctaccgctgcctcgccaaagcctatgttcgagggtctgggacccggcttcgtgaagcagccagtgcccgttcccggcctctccctgtacatgtgcgggaggaaggtgtggtgctggaggctgtggcatggctagcaggaggcacagtgtaccgcggggagactgcctccctgctgtgcaacatctctgtgcggggtggccccccaggactgcggctggccgccagctggtgggtggagcgaccagaggacggagagctcagctctgtccctgcccagctggtgggtggcgtaggccaggatggtgtggcagagctgggagtccggcctggaggaggccctgtcagcgtagagctggtggggccccgaagccatcggctgagactacacagcttggggcccgaggatgaaggcgtgtaccactgtgcccccagcgcctgggtgcagcatgccgactacagctggtaccaggcgggcagtgcccgctcagggcctgttacagtctacccctacatgcatgccctggacaccctatttgtgcctctgctggtgggtacaggggtggccctagtcactggtgccactgtccttggtaccatcacttgctgcttcatgaagaggcttcgaaaacggtgatcccttactccccagcccacaccgggcacccttttcaggtcttgcaggtgtcgactgtcttccggcccagctccaagccctcctctggttgcctggacaccctctccctctgtccactcttcctttaatttatttgacctcccactacccagaatgggagacgtgcctccccttccccactccttccctcccaagcccctccctctggccttctgttcttgatctcttagggatcctatagggaggccatttcctgtcctggaattagtttttctaaaatgtgaataaacttgttttat

SEQ ID NO: 845 - protein, 374 aa, Homo sapiens
MRGRSWHWAAWRGQAHRSTHTWQCPLGDLCPRHQLGGQLCRKWWESGQTWPWRLELPMLSDWLQGSFVWARKGPIVGPGERRIGPGEPLELLCNVSGALPPAGRHAAYSVGWEMAPAGAPGPGRLVAQLDTEGVGSLGPGYEGRHIAMEKVASRYLRLEAARPGDAGYCLAKAYVRGSGTRLREAASARSRPLPVHVREEGVVLEAVAWLAGGTVYRGETASLLCNISVRGGPPGLRLAASWWVERPEDGELSSVPAQLVGGVGQDGVAELGVRPGGGPVSVELVGPRSHRLRLHSLGPEDEGVYHCAPSAWVQHADYSWYQAGSARSGPVTVYPYMHALDTLFVPLLVGTGVVTGATVLGTITCCFMKRLRKR

SEQ ID NO: 846 - DNA, 2811 bp, Homo sapiens
gctcatccagttccttctccttctgtttcttcttgccgcccccattctctgccgtggtggcggcagggttcctcaatgtggcttctactggcaaccccgtgagcatcttctcagagtcaggcactgtgccacgcttgaggaataccatgtcaaggaaggtctggtctggcctgtgccacttaccctctctgggcctcagtttcctcttctgtaaagggggggggtgaaaaacaggtctccagtgaccttctggatcctggaagcgcccttcagctcaaacccttcgcattcaggaactcctggcttccgccaacccctacttcagcagggtttgcagcgaggactatggctcagagcaaataactgaattctaaatgcgtggtcacagtcacctcgccaatcccagggaccctgcacccaactctccaggaaaggctggcagaacccgcgccatcccccggagcctccccagagctggccgcgcaggatgggcgccctcaggcccacgctgctgccgccttcgctgccgctgctgctgctgctaatgctaggaatgggatgctgggcccgggaggtgctggtccccgaggggcccttgtaccgcgtggctggcacagctgtctccatctcctgcaatgtgaccggctatgagggccctgcccagcagaacttcgagtggttcctgtataggcccgaggccccagatactgcactgggcattgtcagtaccaaggatacccagttctcctatgctgtcttcaagtcccgagtggtggcgggtgaggtgcaggtgcagcgcctacaaggtgatgccgtggtgctcaagattgcccgcctgcaggcccaggatgccggcatttatgagtgccacaccccctccactgatacccgctacctgggcagctacagcggcaaggtggagctgagagttcttccagatgtcctccaggtgtctgctgcccccccagggccccgaggccgccaggccccaacctcacccccacgcatgacggtgcatgaggggcaggagctggcactgggctgcctggcgaggacaagcacacagaagcacacacacctggcagtgtcctttgggcgatctgtgcccgaggcaccagttgggcggtcaactctgcaggaagtggtgggaatccggtcagacttggccgtggaggctggagctccctatgctgagcgattggctgcaggggagcttcgtctgggcaaggaagggaccgatcggtaccgcatggtagtagggggtgcccaggcaggggacgcaggcacctaccactgcactgccgctgagtggattcaggatcctgatggcagctgggcccagattgcagagaaaagggccgtcctggcccacgtggatgtgcagacgctgtccagccagctggcagtgacagtggggcctggtgaacgtcggatcggcccaggggagcccttggaactgctgtgcaatgtgtcaggggcacttcccccagcaggccgtcatgctgcatactctgtaggttgggagatggcacctgcgggggcacctgggcccggccgcctggtagcccagctggacacagagggtgtgggcagcctgggccctggctatgagggccgacacattgccatggagaaggtggcatccagaacataccggctacggctagaggctgccaggcctggtgatgcgggcacctaccgctgcctcgccaaagcctatgttcgagggtctgggacccggcttcgtgaagcagccagtgcccgttcccggcctctccctgtacatgtgcgggaggaaggtgtggtgctggaggctgtggcatggctagcaggaggcacagtgtaccgcggggagactgcctccctgctgtgcaacatctctgtgcggggtggccccccaggactgcggctggccgccagctggtgggtggagcgaccagaggacggagagctcagctctgtccctgcccagctggtgggtggcgtaggccaggatggtgtggcagagctgggagtccggcctggaggaggccctgtcagcgtagagctggtggggccccgaagccatcggctgagactacacagcttggggcccgaggatgaaggcgtgtaccactgtgcccccagcgcctgggtgcagcatgccgactacagctggtaccaggcgggcagtgcccgctcagggcctgttacagtctacccctacatgcatgccctggacaccctatttgtgcctctgctggtgggtacaggggtggccctagtcactggtgccactgtccttggtaccatcacttgctgcttcatgaagaggcttcgaaaacggtgatcccttactccccaggtgagggaaaagaaccccccaaccttgttttcattgggcttcccacccccaagtcctgaaccaagctgctccctcccaggccccacctggaggaggagtaggcagctcagatccacagggccctgttaaggggtggaggccgcgagggagccccactcagggctctctgtccttagcccacaccgggcacccttttcaggtcttgcaggtgtcgactgtcttccggcccagctccaagccctcctctggttgcctggacaccctctccctctgtccactcttcctttaatttatttgacctcccactacccagaatgggagacgtgcctccccttccccactccttccctcccaagcccctccctctggccttctgttcttgatctcttagggatcctatagggaggccatttcctgtcctggaattagtttttctaaaatgtgaataaacttgttttataaaaagc

SEQ ID NO: 847 - protein, 607 aa, Homo sapiens; identical to SEQ ID NO: 841

SEQ ID NO: 848 - DNA, 92219 bp, Mus musculus
  misc_feature (1)...(92219): n = A,T,C or G
actgaaaggcggctttgtgttgggcgctgtgtacacactaggcttgctcattcagtcctcgccacagccttggaagctaagagctgtgcttacctccctccatgttacagccaggaagcgggagcagagaccttgtgcaatttacccaagtttgcatagcaaataaacaggaacgctcacaggcaaatgagcctaaatgtcctgaacatgtctcctctcctgtatggtgacctgcatacattcagtgtgtgtgaatatgcgtgcggtgtgtgtgtatatatagtgtaaaggggttggggtgtgtgtgtgatgtatgtatggttgtggtgtggtgtggtatatgtatgtgtgtgtgtgagatgtatgtgcggtgtgtaatgtggtgtctctgtgtgtgtgtgtgtgtgtgtgtgatgtatgtgtggtgtgtgatgtggtatatgtgtatgtgtgtgtgtagtgtatgtgatatatgtggtatggtgtatgtagcacacagtaggtgttctataagtatttcttgaataagccagtgcagtgctagaggtcccggataagaggaaacaatgagagctgtgtgctgggactttgagggaaagagagaagaacaggtttcatgtacacacgccaaagacgtctgactctggggtctcagctcctcacagcctcccagacgaggaaagagctttgagacccagctccaaagcaccccagcatggaagggcttctctgttctcccctctaaccagaacagaaggcagggaggtgcaaggggtggtgtgggatgcacagcctgcccagccagctcacccaagctctgatgctcctgcttagacctccctggtctcagctgagcgtcttcctcggcctctttcccatcagtccttgcctgtccacttgtccacctggactccgaaggaggccagtaccccttggctattctggctgaagagtggacaattccctttttgcttggtccaactgaaacaaggatggaatttttccaaaggctctctattaggaaagtaacggaaaaacaaagccagaaataaaaactgcaaaaacaaagaaacagatggagcagtgggggtgagagtgctggccatgggagcgagtgggagctgggtcccgatggtaagacaatcctcaatacccagacacacacacacacacacgtatacacacatgcacacgcgcacacacacacacacacgcacacacgcacgcatgcgcacacacatttctacacgcactcacaacatctgccgttggccctcggatggcattttccacattgaactgtatatacagagcttgtttcaatctgccttcttattttgactgagcttctcaaggccactgccaattctaattattcctcctcttcctcctcttcctcctcctcctcttcttcctcctcctctgtgtgtgtgtgtgtgtgtgtgtgtgtgtgtgtgtgtgtgtgtgagggcagggagtgagtagaggaaatcagtcttttctctctggttaccccatggcctccatggtggacacttctgtttcctctgatctctgattctatctcgccctgaccacttccacccacacatgaaagtttcctatttcagaactcaaacatctgtcgctcaaaaatcaagccacaccgcttcctgggcaacctagcaagggcaggctctgtgctccaaagagggaaggtgctggagaccacatccagtgaaagagaaattgcaccccaaaggctaggaccttggagatcgagggcagaaagtaataatctatgttccttaagcatttttgccctgcacgcagagttagtgactgggtaaatgtgttcaggaaaccttctgtccaattagtggtcagtctgagatttactttctaggcattctgactccatttgtggacacaaaactggtgtctggggcatgacatgggtatggaggtgtgaccagctgccagccatggtgacagggaacaccaagaaggagaaccagccactctacattggcactgtgtgttggcacagaggaccctacctcttgatgttcttgggatgaaggggccaaccaaaacaaacataaaatgtatggtctgagtaggtggggctggtatgtcggggctagacagtaaggctttgggcagacctggttctcacagccagggggcactgtccctaacttcagttccattatttctataatgggagccatggccgcactgacctcactgtttcctggtcattgtcaggaagataagttatggtgagcgctgtggcacatgggcagtggggtaggcccagcgaacaggagaagagagtcctccacacaggaccctagccccgcatccctcacaccccctcctcagttacccactgtcttctttcctttctatttcctaaagcaatcttcttgaaagaaggtggcctgcttcagcctccagcttcctcaccacatgccctgttagtgtggaatgggggggggggggggggggaagggagattgttgtttccaggtttgacctgccatgaagatggcttccttagaggtcacaacagtcacctcagaggtgtctgaggtaaaaaaaaaaaaaaaaaaaaaaaaaaagaagtaaccagcctcatttccctttgtcaactggaacttggcttttagagttctttcttatgctcttataacagttcctctctcaactctaggtccttagcttgatctagctctctcaatctttctggcttctctacctcaccatcttctagaccagttgttctcaaccttcctaatgttgcaaccctttaatacaattcctcatgctgtggtgacccccaaccataaaattatgccccttgctacttcgcaactgtaaagtcgctagtgtcatgagacagaatgtaaatctccgatatgcaggatagctgatgtgtgacttccatgaaaaggtctttctagccacacaggggttatgacccacaggttgagagccgctggtctaggctcatctttggcttaagtattgaacacatttcttcctaagactcttgccatttgtcctccagattcccccaccttagtgacctctgcctccatggtcatctctatgcaggtgacttccacagcccatgctccctgcggaggtccagtcctgtctcatctattcaagaagcccctcctgcagcctgaccacacacaacacctcagcctcacaacccaccgcagggatgtgatagcttgtttcccaacttcataacagtcagagctgcgcaacacccccactccacaagtctttcctcccctgccctggcaagcaaccagctacggagtcctgaatgctcacctctgctgttcccccccacctcctctcctgccacaccctctccctgatagctcctatctcttccttccagccccacacctcacacccatgcgcttgcgtgcgcacacaccccccccccttcaatcaaaggagtcttacccagggtacaatttgaatgagatgatttctttcttcagaaactttaaatgtctccatattgtttatagcaatatttctcaaactttctcggtggtaaaaatacagactcccactccccacccccgccctcatgaatcagaatctttgagcctggccccactgttctgtatttttaacacgtatccaggtgacttttagcatcacaggtttttattttccttcttcttctttttttttttttaacagaatgctggcatttaggataacacttagtctgacattcgaggctctctgtatccacttcccagattgacttcacattctcctctatactctggatgctactgcagcccctgatgtcccgaacctacagggttccgtctcacggagccagatctctcctatctatcaagactcaattaaaaggccacctcctccgtgaagaccttcttgattcttccggctgagcatcatctctctcatcttggagctgatatcaccttctagtctaaccatgtgcaatcagcaggcattagcgcctagctcacagagcgctgttgttctctttccctcccctttatcatctgtgctctttcttgttaccattgcagcccctagagccaaatagactaggtctgagtcccagatcccccacttgattgggtgcctcagtttccctatctgtaaagcagagttggtacgagaactaaattaacatgcgtcgtctttagtttcggagtctggaggatccaatgtcagggtacggacagatgccacgtctagtgggaaccttggggtaaggtccaggcctggcacctaaacttaaagctaggatgagaatccttcacttagccagtcagtggagaagttgcaggaagattaaggaaatggagaaatctcaaaggctcagtacccactctggggaagtagggtcaaagaatggggtggaggggtttggaggctggggtgcgaagcaaaaggactgtaagtgtgggaaccgtgactcggggttatggtggtctttccagtactggcccagaatggggcatacagtaaggtctcaacaagtacagactgaatgtctcagtggctcgatagcatcacaaggagcacacactgctgattacgccatattcctctagggataagatcctggactctaagagaaactgaggcaaagaggaggtcaacctccctagaactctggaagtgcgttacataggacagaggccatggctcggcgtgccagatgtttacagggcgccctgtccttgttgggcatacagaatgccaaaggggacaagcagaaaaacggaactcgatgctggctgaggaggaagggcatggtaagggaagaaggaggcaggcaggaaggaggaggctaggggccaggccaggctgccccttgataggaggaatgggagggtggggaagctctgggccagcggctgggtcagatcctcagccaaagcaaacctacctcagggggctgggggaccattccttccccacacagatggaatcaaaggcaaacaggaaccctgcagggcccagctgtgacccctgcccccaaactcagcaagccccattaaccctctcctccctgacacctcatatcgccacagtccaaaagatctccaaagacaggctcacctgttatatgttccctgaataccacccaagagatgccaggatccctagtccaaaaggatacccagaccctgcccacctccatggtggctctgtgtaaaatatagaggtcatctttgctaataaaacaaaaccaaaaccaaacaggccttcctttgtttctatgccaagagctaaagggttcagactcatttcctatactcacattaattgaaatagacacacctgtacctactaacaaggctgggcaggaacaactgcccccttgtctcctctcagcccaggggaactgcaggctactgctcccctgagctaggcatgagtaagaggaagtagcccagagtttggggagcgccagaggtgaaaggagatctcacaggctttctggcaccccttgtcacccgggagacaaaataggtgacagcctgcccaaggtcatccaagtggccagtagcaccactgggacctgacttttaggcaagtgtgcaccgcaccagtccatgactcaggccccaggaaaggcaggtgcaccactgagcccaagacagcagacacaaaaatcttttctttttcaatatccttaacaccccgacctgtgtgtcccattggatgggaatccaatgcagacctttctggatccagagaagcaaggaaagcaaagagataatgggttaggatgcaggagaccaggaggccgcttctcagtgcctttatctttctcttttcccaattctaaacaatgtattttgaataatcaaaaaaaggacaagaacaccatgggggaggggattaaagatggcggacggcaggagagtccaaggaaaagaacttttagaagctacaccaagtacactgaaaagagagacccacgaggaagccaggagaaccaatatcagggaaaagagaagaaaacccacacagtccctgtacttcagtggggaaactgaggtagtagcaggcctgggacagctacatctgtgacctggagccaggccactacagtctgagggaatgtgagcggagagctaggaagaaaggagacattaattaaggccatcctgggccttctagtctcccaactaatttttcaccccatggtggtctttctttgaaagaaaagaaaaaaaatgtcacccacactccagaaggctccagaagtctggcagttgagacaagactacattagaaaggaagatgagaggttcagggaccaggagagacaggacagcccagggggctggcagcaggagaggcaagcaagagggatggaggagaagaggagtggggtgagggggcgggggcaggagaggaacaggggtggaggtgggggtgggggtggggagtgatggagtctctcccagctcttccttcccaccctctgtccctcccattctctctttcatgatcttgaaacaaccttcaagtctgggctggaggccccaggaggccagtcacttaggaaacaaaactgtttcgtttacaagtccatctgcagctgagcgcccaccctccctcccccttacacactctcccatggactctcacgtacacccacagtaatgcacagctttccctgtagcccgcgtgaatgcctgcacacggacacgtgcacaccacacgctcctaggcggactactaattcgtaataaatggggtgcacacatctgagcaagcgctgccctgtccccatcattttaaaggaggaggaggcaggctctctcatcttgtctgagccggcttctcagacttgctatgtagcttggggtgaccttgacattctgatcctcctgcctctacctcccaggcattggggttgttctacaaccctcaccttagggatatttgggatagaacccaggtttccatgcttcctaggaagtcacccaactgaaccacttgcccagactgaagctccttcggagttagtacttggtacattcctacccacagaatcccagacacgagtgtccccttcggtcctaactagcatcccacctccacactagtacatgttcctatgtctctcagctccctaccctgtgtatacacatcctacttcccagatctctgccgaccaaaggcttgggccttttccattttgtcccttgtgaccttgtcctactctgagttttctctcaagaccactcccgccatccgtccccacctcttgttctcaggtctttctggttttcctcctttgttcctctcttgactcaaataagtccccctgtctggatccccagttagagattaaagggccagatgtctacctccactgtgatctggggtctgagacagactcccataggtccgtgaagggagtggtcaggaaggcgtgggtgagaagcaggctgtaggtgctctgcctgctgtcacttgttgcctctcgagtacacagcacagcacagtgtccttggggctctggtcactcaaatgcaggacatggcagggagccctagcaggctttgcaagcagaggaagggcacagccctttccgttactgagacagcagaaccaggctgtgggaaggcctgggcagtactggaaggtgccagcaggggtgggaggaggttgggagagcacacagacgctcagagcctttctcttcagccttaccttatatcttgaagaggctagggcgattactcaggaactctggctcaggcctatagatgctactcataccccccataaggatcatctattcacccctaaaccccacactccactagccttcaggtaaatcttctagagccttcgtccccagctttacatcttcagctgttctctgtgtccttgacacacagggactgtgtttaatttcctctcatgattttcccagtctcatctactccagacccagaccgtgagaatggaccacagaccatgagaaagtccatgtgtgcttatagggcccatccttcctgcctaggcccaggaggaaacagttaggggcaggtaggcgctgaccctccgatgtctgtaatggaaaaatctcagctgcagagccggaggtggccagctatttagggaattcagatgtgagccctgtgctctgagagtagatttcctggacaagaggtccataatcgctctacagggagctccctccagggccagagggggctcaacccagccagcccagccagcgggcaccttaggactcctgccaatgcctcattgcctccctcctccttcccagccagggttctcagacctgcccctgctcagtgggcgtccactcactcactacatttcggtgcccagagaaatggggacactgcagaactttatccctctaactgttcctagtcggtgggggcagaaaatcttcttctctctgtccccagcctccattcttcaacaaatgaatgatgccaacacccccccccgcccccagagcggctgggctggtcatgagttatctgctctgttcctgtttctattgagagtaatgttgaagacatcttctcagctggaggtgaagccccctccctccccccagacccaacctccaggatctcccatgccattaaacaggtctctcacagtggagtctgcctgaccccttcctcccggaaggaaccaaggaagtccttgctctttctagtcccacagagttggtatttgaggtgataatgacttccatgccctcctgctacaccttccagatttgacttctcataccattcaccgacctccaacctccgactcagactcactcgaagctcccctgtagcagtgaaggggaggatcatctgcttcacacacagaatggcagagatgcttccaggtgcctgctgtgcccggacttgggcggccttcctggctctttcatatcttctgtccttcaccttcccaactgcttctaagtgcggagactcttgcttgtcttgaacactgggttacaggtgtgtacaccattaaaaatcatgtcacaatgttgcaaccaacaacattcatgtcatctacaaaccacactggacaactatgaaatcacattatcgagagagaaagagagagagagagagagagagagagagagagagagaaacacactggttggtggtggcacattctcttaatcccaacagaggcagggggatctctgaatttaaggattagccagatctgtagagcgatttccagaacagccaaagcaacacagagaaaacttgtgtcaaaaaaaaaaaaccaaataaacaaacaaacaattgctacactgttacaaagtatttcagtgtttgaagtaaggttaggatgtattgggccaaattcctagctatggtggtggtggggtggcgtatggagcccaagagcaacaagtgggacatgcctggtgcagcatctccaggctttggttctgcaaggagcttcaaaagcaagagtcgtctgattctagttctaattctttcttggtcacaacgtccttgcagccccttacagcagatggagcaggctgttgctttctctggaaacttggatgtgagctcagggagattctgtcttatccagtaagattgctgaattcttatagccttgcttccccacctggaaatataggcaattagtcccaggaccatgagctggctgctctcgaggggccacctctcctttttccagctaccccttccccattcctttccccttgcttctctcttggttgtagctgcccatgggatggggaaatgctaagaggagctgagggggacagaccggggacaaaacaggaccatcagctgggccagttgctaaagaggcgggaggggaggggaggagtcctcagggatccagtttcaacaaacgtttctttccccagaaggggaaggcgggagtgagggggagagggacctatttaaagctaccctgttgctcagactgtctctgtctgtctgccagggtctccagctgccccagacaggcggtgtggtcttgggatcctcctggtgacctttccagcctaggtcccctcagccactctgccccaagatgggtcgtggggtgagtatccctccaagatcaggggccactctctggagggtggagtagaaatgggacgtggagagagggtgagagacgctgacggactgcgtgggatggtttgaacttggaactagtctcccgactgcacatgcatgtggattcgttccacagagctcatgagcctagggattggcaggttctgcagctaccctgctctctgcctctcccacaactagcctaagaaactacccaagtgcccttctagatctccctgctctctgcccactcatccttactccacaaatccctcctctcgctccacaatccctagcttcccagctgaagagatctttgacactgttagttctctgccgtccttgttacccactgaaaatatctattgctctgaggtccttagcccaagagtacaggggccagcctggggtgttgtggagcaaccccattcccagagccacctagcagttgattacaccagttctcagggttcttcatgccagagtcagctggggcagagagagcaaagatgtatccccagccctcaccccagcacccctccggatgtccccataagcactgtcctgggctccaggccataggctttggggacctttccaaaggctgctgagaactgtgcctgcctatggcattgtgaagcaatggatttgccagtgaaaagattaacagccatatctgggcgagcaaggacaaggcttccaattcttgggaataaaatccccatatgaagaaaaaggacccaatccctttccatactgtgcttggaagttttcctcatgtggaatcctggcaaaagagggcacagagggaaagggcttgacaggccattgcaaaatgcgagggggacagtgccacagggtgctgtgagccaatttctggatccaaggaggagtcaggcaaggacatgttattgcactaagctgaacagctggaaaaactcgaatcctggacaccagagatccagagcttgggtgggaactggaaatagaagaccatcgcgcatgtgtgcatacatgcatctgtgtgtgtgtgtgtgtgtgtgtgtgtgtgtgtgtgtgtgtgtacacgtgtccacaaccttacaatagcgtgttcctaggatagtgctgcaggcttccatgggtgaacctgcactatgtttcagcaggagaatttgcaaatgaagggcctctgggcatacagggtgatgggtggtgagtgtaaggtgagggctgtaagcccgcccttaggaactatctatgggcaatgggtttccccaaggaagagtcatggttaaactgggaccttcagtaatatcgttcctgctccccatagaaagagcagatccagctgaggggcagaacctctgagagtccagggccaaccaggtcaggcaagcccaacctccatctaagtagaaagaaagagcagacactcctccactctgctctaccccagagtaaggtagccccagctcatagagttcttttgactttgaaagtaacttgaccttggcttccccattcagaacttctcccctagtacccttgctgggtccataacctgtggcacccctaacctagtggctgcgcgtgactctgctggtctggtctgtttagcggaaaaagctgggttaagtctgggagctcagagtcctacctacaaggaaagccctgcagaaaacaatcccactccccacactcaactctggggtctgcttcacctccattccagtccacgcctgtgtggctgtgaagggcagtgtgggagctggggagagggatcacactggtgggagggagccaagcctcctccagaggctgaggtgggggtggggggagcgttggctgctttccagctacccccactttgtcccagtctctggctttctgaaaaaagaactctctgttctcctacaacattgaagaaccaaagagagggacttgtgttaggggagggaggggagaccagagggggagagaggggtccccacttcctctttctttcttccctgggcagccactggccccaaatctctgcaggctcctggccatggagcctgagattcttgccaggacagaagaagggggaagggcagccgagctctgcacttatgggagagcagggtgggagctgggaagaaaaagcgccacatggagttatttagctcagccacaatccaacacttaagagccagtgcatttctcagagacacctatctgtttgtttgtgacaggatctcgctatgtagcccaggctggactcaaacttccaatcttcttgcctccacctcccaaattatgggcatacagatatgcacaccaccagtcccagctccataagtaggcatttgattctcattttcatgtctgttgtttgatatcaaatgtgcagagattttcctggactctgctgctcggacctctagcccaagcctcccacccctcaagcccccaagggccacactgacgtctgtccagatgctttctcgaattcaatcctactgtggcctcctagcctccactcagccctgcctcaccaagcatgctagaggacagaacacttcaattcacccgacttaatgaagcctcttgcatcgcccggggaagggagaggtagaaacatttctgagttgttcttagcgcctttggatgaccacctcagtttccccgtgatgcttggcctctagacgctcagaaccagattgcattcgtgggtagttcagatacagatgaaagcatgacgggtcagtttccttttctaaacggagtatgtctgagcaacagtctcggagagcacatcttctaggtcattgcatcctgaaacaagtgcccaccttgtagtgtacctcccacgcccagcattgcttctgatttcgctggacagaattctattatccaaggcgctaagcttacgattccttaggatcacagcagctgcagtatcccccagacggctgactccgataggagaaaatacattattctcagtacccaggactcagaggaccacagccacgtgctggtggaatggcaggatactgctctgcatttgcccggatccatagaacatgcactcactacaagagtgtcagccccggccggccacggggagatgctgatgaaacaatgcgccactctaacgatgtgggatgctgatgaggagggaggctgtctatgagtagaagattcacgagaactttctctcctttccactcacctttgtggtcagccaaaaagctgcttaaaaaaacacctgactaaaatacataataagcccccccccaaatacataatcttgaaaaacaaaataaacaagcagcctccccttacactgatgcgcctgtctaccaggtattcattcgttctttatgcaaaacacaaatcataaccacagcatcaaaaaaacgactcctgaaagctcagtgtagccttgagggtccatagaagagcaggaggagccaggcataaacagctaccccttgtatcctgagggaagtggagagacacggagggagagacagacacggaggaagatgacagcattttgcacacgatcaataaccccaggtccttcctagcccaccccacccccccagtcccttgctccaaggctgcctccattagaatgaagaatcctcaccatctgcccaaagaagtctgcagtggccctgaagagaagggcagacaggggccccaaaagatcactattaaaaaacatggcgctgatctggacagatggcccaagactgaccctgacttccatggtttcagatctctatttactctcatatatatttcttgctttggagtttcaagtcctgtgagttgcctgtgtccagtcccaggcacgcctgcccaagcaggctggggagggttcccagcatgccctgggctcccattttatagctgtacttgaacccatcccttctagcttctctcagcccatcatctctacccatgccatttccaccatccagtctgcttctccccttccctcctgggacttctactctatccagtgctcctctctaaattaggcagacattcctatggggtaccctacccatcgacgcaatccctgcccgcccccaaagtcccttccgataatataggatgatccttttcaagacgtgttctgattctaatggcaggacatcctcagtgtctggtgtgaacaggctccatccagtctccctgatgatctgagccatcccttcctttttcaggcagggcgtgagtactcgcctgctgccaccactgcggaaaatgggggtggcaagaagaaacagaaagagaaggagctcgatgagctgaagaaggaggttgccatggtaaggaccacagagctttcaggggggggggctgtggagcagcagctctgctcgggcactcacacaccagcagccatgagcacccagacgagctttgtacccaggcccatgctccccacttaacccagtgccccgaagtgtgcctagcctcctttcccaaagtgtctccatttccccttccccaggatgaccacaagctgtccttggatgagctgggccgaaaataccaagtggatctgtctaaggtgagtggagccatgaggtgagagaggcaggaagcttcaggaacgagagccccaaaactagaacacaacgctccttgcaagtgagggaagcagcccagagatgaaagacttacatatggtcatgggattagttggtggcaaggccagaagtagactttggacccctgcttctccctctttccctgtgtatctagaattccttgaaaccctgggcccagaccttggcaaggctctgtgctcctcctcacacaactgcttttagagatgacaggcatggaccagcaaggtgactcatccctgttgttatagtacttgccggcccctgctacatcagtggctctgtaataagatgcagtgcagacatttctttaatcctcaccatagctgggtcaggcattgtcagcctgtttattaaagcaaggagactcagaaagggagactgacttgctggatctgtatccgggcccatgccccccacttaaccctgtgcttccaagcgtactcagcttcctttcccaaagtgtctccattgccccttccctgggatggccagaagctgtccccggatgagttgaattacataaacaaatacaggcagattgctgaactcccattaaaatatattttaaattgttcctcaaagctaggtggtctgtcacactcctattgccccagatagatacttggggaataaggcagaaaagattgcacgttcaaggctggggtggacaatgtagagttcctgtcacaaaatcaaatcgaagagggctatggatgtagttcagtggtagagtgctgtgtagcttgtgtgatgccctaaattcaatccttagttttaaaaaaaaaccttccaagcgctactgtggtcaactgtagtcttaggtacttaggaggctagaacagagagaatgcttgagcccaagagctgaagaccatggtagacaaactattgctatcttggctcaaacaaataaaaacattgttgaagctagccacaagtccaaggccagcttgggcttataaagtaacttccaagctagaacaatcccgtctcaaaagaaagatacaaaatgttgtggtcagtatccctgacccactcctttctgtctcttcttaaactgctaagctcccattctttaaccttactttattttctagcaggagctttccactctctggcatcattgtatatttattattatggtttcttctttagattgtgggtgggtactttgttgatcttgcccatctctccatccttcccagtgccgggcttgcagttggagctcaaggttcacacataaagtgggtgaacacagaacataaagatcagtaacaagtggttcctgctcaaaggcagtaacaaaaatttcaaaaacaaaaaccacacaaacagaaggccagtgtaatatagtgagccccactctagttcaagcatgggggattgggggattacctggatccagaaagaggcctttgatctagcctggctggcgagatcaaagagaagtgagcctggctaggctttctttggaaagtaataggtgattgccaaaactgcgtgacacccagggtcaaagctgtggggctttccctggagccctggagaaaggcaggatctacaggaagaacggagggtggtcagacaaggaatttttccggacaagaaatcatgcttatgcatgctgtcccaacaaaaacatctttcgacccaagaataacccaggtggagccacagtgagtccatattagccttcaagacccaagtctcattatagacaccagttcctctgtgtggtccctcatgatggtcccaccccttccaaccaaaggagaattttctcccttagctgaacatgattctctaagatgccgagagatgtggtgagggttgggtttgttccctgtgccacacccacacttttcttcactccccagggcctcaccaatcagcgagctcaggacattctggctagagatggacccaacgcccttactccgccccccacaactcctgagtgggtcaagttctgtcgtcagctttttgggggcttctctatcctgctgtggattggggcactcctctgcttcttagcctatggtatcctggccgctatggaggacgaaccatccaacgataatgtgagccatgcacctgacccctggacctgcttatagccctgccctccaactcacaacctcaaataaggtgatgggagggctcagggaacaagatcacagacccagtcaggagctcagactgatgagaagtgaggcttctatacatacctgtgacgcaccctccagcacatgtgggcagtgatacatactacatactccttccactaataggctgtctgtatccctgcgtcttcactcctagaaaagccaaagccatggggattcccttctttgccccttccatgctaggagcgtggttaggagactggggaaggttgtggagaaagactactcagtgtcattctcaagattgagtcaggtgaaggatggggatcccacatagagtgactctgggtgctcatcccaggtgtcacccagctctggaggtgacaaatgacaggtccctcacacactctctctccttaccagttatatctaggtatcgtgctagcggctgtagttatcgtcaccggctgcttctcctactaccaggaagccaagagctccaagatcatggactccttcaagaacatggtgcctcaggtagatgtcagggactggctgcacccaagtcggggcataaggtatctgagacggtccgcctctttctgtcttgtggtctgaggtggaaggaagatgggcagaaaagaaacctgtgggctctccacatcagatcgcagttttgccgctaacggtgtagggggttcttcttggagagcaaaggtacaaatgaacaactcatgacgggctcctggcctttccgcagcaagctctggtcatccgagaaggagaaaagatgcagatcaatgcagaggaggtggtggtgggagacctggtggaggtgaagggtggagaccgtgtccctgctgacctccggatcatctcttcccacggttgcaaggtgaggaggtcaccgatgaatctgtacagttaagagaggcccacatgaaagcttaaaagttaaaaaaaaatgcaaacattaaggtctcccctgtacctggtatacctccttctagcatatgatggctacatgctacctctgtggatctatctgttaggaatgctctgtgccctgggatttctttgatctagtcattttatagccactgtatattaaatactatttccatgatagaagtctttacatacaccatctaatttcactctgaaagattccaggccagcctgggctacagggatccctgcctactaaattaaagtttaaggaaagaaagatgaagaagctgggtgtggtgggtcacacctataatcttaacctccccacaggcggagggtggaagcaggaagacggagagagttcaaggtccacccatcctgcctacctagagagggtgtctggaaaaagatgatgtaattatctgtcacagcctgataaccctgggaggtagcatttttatagacagtcttggtggtgtctctggagttgtgcaacacaatgaccctgctaacattcccactttacaggtgaacaaacaaaggccgtgtgggttacataaataacccaaagacataaaaaagtcaggaagactcagtcatacaaaccaaagccagggtgatagctgagtaaggccataaatatgtgatgagggcaagtgtaattttgtccttcttgtcatgaagattgaggggggttgaatctggctcaggagacagctgtgtgcccacagagctgctgctgctgccagtttaatgatggctccccttcctcctcaggtggataactcatccctaacaggggagtcggagccccagacccgttctcctgagttcacccacgagaaccccttggagacgcgcaatatctgtttcttctctaccaactgcgtggaaggtgagacgctagcctcccaagaaagctcctcaccccagcacagtgcagggaaggggctgactcctgaaactatacttatttggctaaagctccgcatataaagggcattgagggaactgaacattgcggtagtagtcatctctggagaacagggccaagggcagacagactctgctggaaatcacctctctacaggaagctctcagttctgttgatccccaggctgaaagccttccacaaaacactcagatggtgagtcaggatgccccctcccccaactgttaggagtatggaagtcaagtgaggtcttctagagggtggttctggaccaggcagtgagctgagtcaggactgactctgggaagacatccaggggcaagagatggtaggagagagcagtgtgcaaggaccatagacctctcacaaggtgatatcgaataccttcctgcatccttgcttcacgactttccttctcctccatgcattggttctttgggcttgtttccttccttcagagaattggaattacaataaaaatcactacacattaaatttcctaaatgtttaatgtattgggattctgatttgccatagcgttcccacaactgaatgcatttgaaaggtcagataaggtatgcctactgcttatgcatcgactggctctgaagcgaggtcaggaaaagaatgcaagtcatattcgttgcatgcttgctctgtgacagatggacagtcatagtccatttaaccactgacttcctaggtaggagctctaatgtcatttgaacctagatttggctgacttcaacatgaatgcccttcccagagtaccacacattctttcccaaagacccctgcaatgtcacatattttagataatcacaatcttattttacagattataaatatatagaatgaatatatagataaaaatatgtagaataaaagattattttattctacattgagaagatcttgtttttttaattaaaaaatatttcataattgtctgtgtgtgaatgtgtgtgtgcgcgtgtgtgtgtgtgtgtgtgtgtaagtgagcacactcataccacagtgcacatgtggaggaggacctgcagaccttgcttctctgtctaccacgtgggttctaggaatccaactcaggtcaacaggattggcaggtaggagcccttacacactgaaccatcttgctggctcaagaaaatcttaagactaaaccaaccagccaacaaaaaccaataagtaatttactccagtttatcataggcttttgaaaaatatctactataagattgatttgctgaaatgtcgcgatcaatttttatttcatttattgaacctcttcaatttgaacttctgtagtacttgccagatgtcttctcaggcccaaatgtaaaagaaaataatttgctattgtattaaatctaagattggtggtgtatgcagggaggggaagccctgtgtactaaaagtggcctgaaggatctgagtcttcagcttatgcactttgtgatggttttatctccttagaaaatatgatgagggggctgaagcgatggctcagtggttaagagcactgactgctcttccagaggtcctgaattcaattcccagcaaccacatagtggctcacaaccatctgtaataggatctgatgccctcttctagtgtgtctgaagacagagacagtctactcatgcataaaataaataaataaatctttttttaagcattaaaaaaatatatgatgagatgtcagtcattggcaaacccagggaatttaccctctgttttttccttcatggcaggcactgccaggggcattgtgattgccacaggtgaccggacagtgatgggccgcatagccactcttgcctctggcctagaggtgggacagacacccatagccatggagatcgagcatttcatccagctgatcacaggggtggctgtgttcctgggggtctccttcttcgttctgtccctcatcctgggctacagctggctggaggcagtcatcttcctcatcggcatcatcgtagccaatgtgcccgaagggttgttggccaccgtgactgtgagtggttgaggctgaatcgccaccagggccttcttcctgtttgacacagaccgttgcttactgcttctcagcagtgttcttcccttcaggtccctgcagtcacatagcagatgccgtatgcagaaattgttcagggcatgcctgggagtttgaagttgaaaattttgggggttgagctgtatctgagcattcaatttctccttggggacttgttgtggccgtgttcctcaccatctgtgtggttgtcgcccgactcagtctggggttcatcctgtctcgtgtgctataaagactctttcaaaggtcaccagtgactaactagcaaatccattgacatttctcagctctcatccttaatgctgctgctgctgaaatgaatacttctgtccatccccctgtccttcatcagccactgtgatgtgtcactatcctggttctcctgtcctcacagcagctcagtgactgtcaagccctagccccagcttttctccttgctgccctcagaggaacccattttcatccatagtttctgttgtccctttcatgtgggtggttgccacatctttgtacctgctctggagtcagatatcatgaactttcttccgggcgtttaccacagatacggcctaagaacctatttaagatgcctaaagttgaactgtcgctatttcctgctaggtcccacccagtcttttgtgagtgggattaatagaaaaggattagagcttccgaatgggaaagaatcatagacacctgtcactctcgacttggcccttttaattctcctctctgtctgccaggtgtgcctgacgctgacagccaagcgcatggctcgcaaaaactgcctggtgaagaacctggaggccgtggagacgctgggctccacgtccaccatctgctcagacaagacgggcaccctcacccagaaccgcatgacagtggctcacatgtggtttgacaaccagatccatgaggctgacaccacagaggaccagtctggtgatttgggtgctccggaaagggtgacgggaaatggatcctgccgagggaccacgcagaagagggatcctggggtatgaaatgctctaagggagagccaagcttctccctcctttcttcccaggggccacttttgacaaacggtcccccacatggacagccctgtctcggatcgctggtctctgcaatcgtgctgtcttcaaggctggacaagagaacatctccgtgtctaaggtagggggccagccagtgagtgcagacacagatgtattggggggctccttgcagacacccagctttccctctctcaccctgtagctgctttggtgacctcggctgatgctctgtctccatcctccatctcctcccttcccccaccgtgacactgaattctcttttcttctggcagcgggacacagctggagatgcttctgagtcagctctgctcaagtgcattgagctgtcctgtggctcagtgaggaagatgagggacaggaaccctaaggtggcagaaatccccttcaactccaccaacaaatatcaggtctggctggattgcgggggacacagagagaaaaaagagggacacgaatggggagagtgggtgaacagagactcagtagaagaaaggatgggttacatctgagaaacatctgttcccaggtcaatcccgggacaactggcctggctgcatcaccctcgaacaggcaaaccttaccacacacagcttatcccattctctcctcttctgatagactccccatcctctggcaatggtcccccaacactgccatccgaataactaacgcacacttccatagttcccatactgtatccctcagccttaggatacctgttcctgccaagaatagcctcgggtctattctgcatgcaccatggagggaaaatccccagggcattgaggactaggagatgctaatgaaagccatccagcccctacctagcacaacacctatcccgactgatcttaatacctatttgttgaacaagtcactgttctatgaaagcgactccatagaactccatgggttttaagactcaggattataagcaaacaccctccacacatagtttctcctttgttgacagtctttgatggataagatttaagttgttaaggaaggttttccttctaaacagctgctatcagaccctgagctaagcaacagagccaccaagattctatggctccctctgtaaccgcctttcccttcccagctctccatccacgagagggaagacagtccccagagccatgtgctggtgatgaaaggcgccccagagcgcatcctggaccgatgctccaccatcctggtacagggcaaggagatccctcttgacaaggagatgcaagatgcttttcaaaacgcctacatggagctgggaggacttggggaacgagtgctgggtgaggaggcagaaagaggagcaaggctgagaaggtggggccttggtagtgtctactctgcggctcttactcctcccgcttgctcctcctcaggcttctgtcagctgaacctgccttctggaaagtttcctcggggcttcaaatttgatacagatgagctgaactttcccacagagaagctctgttttgtggggctcatgtctatgattgatccccccagagcagccgtgccggatgccgtgggcaagtgccgaagcgcgggcatcaaggtactggcctccttcctacccaccccacccgtatccttgtatgcctggtgccagaggtcaggggactgcagcagctgctgtcctgaggtgacgcaggctcctggtggcctccttcccactgacctagaggtgttatccatctgtagggaaaggcgcatgcctgacaagatcgctcccttctgcctttcgcttaagcctattatctagcccagctcactgccccgtctgcatgtgccgtgcccccttaccatctcagtctcattcaaagcaccagtcggcactcctggcatggagacctagttatttgattgtcccactgatgctcagtctatccatttggaaaaggactagtaagctcttgactaccccaatgggctcctcttatcactccatattctcctctctcatccatgatcctctccccacccccccactgaattcttgtccaagtgcggccggtcatttctcactgactactctcttttatttgtttggtttgttcttcatccagaaaatatttattgcttatcagaatgcatcgggcacttggtccctgacatcttctttttccagtcaccaattctggtgccatcactgtcacgatttttaaaaaaaaaaaaaacaatgcaactcagcctgtcccctgaaagccaagtctttgtatcccactgaggatacaaagatgcatagaaactgagctacatctcaagatctctctggattggggggtagaggggaagatgcttctaaacacatcacagaacagtcacaagagttgggggtcactgaggacctactggtcagatgccctaataataagttattttaatttcttatactcatcagacactactctaagcactgtgcatggctgccttctgagtaagtgccagcatctccctgttacatagacagagaaaccgaggcacagagtagcaaggccaagaccacagagctagtaagttgctaagtcagaatttgaaaccaggcagtctgtttcttaaccatcacaccagaagactgggtgctatgcatgtgcgtgtgttttgaccacaataagaactcagtatggaaaataggcattattaacccccactggaaaacaaacacagggaaactcagagtaggtaaatagcttccccaaaatagaaatgtagtaagaggtcagctgggaatgggaagcccagttggcttgtctgggagtcatggtccttctgcccagtcaggtgcctctcggcatgatgagaaatggcacagcggctgggcaagggctctgtggaaaaccagcggggaactgttaattccacctcagagaactagacagggtttagcagaggggatgatatttgacctgggccttaaaggctgatgaggattcagtaggctctaaaggaaggggagccgtagcaagaacaatccgtacccagatgtgcctagactatcaggaggtatgagggtcagcagaggagagatggggactactgggaattaggactgagacattgggtcagggccagttggaaggatttcctttaaatgccagacttgtgtgccatggaaggccacagatgtcacagggaaagctttaaggctacctaatgggggatggactggatgtgggcaagagctgaagtcagggaaccaaggagacagattaagacagattaaaggtgcacaatagcccaggccaggacgaggatcccaatgggacagcaacacagggaacggagacacatagttgcccaatgggacagcaacacagggaacggagacacatagttgcccaatgggacagcaacacagggaacggagacacatagttgcccaatgggacagcaacacagggaacggagacacatagttgcatttgagaagcagtttgagaactcggtgagcaagctgggcgtggggtacaaagatatgggagagaacaggacagaatggtcagaacagatggtatctaagagagggagaggagctgcagggtgctgggaggactgatgggatttcagcctggaccgtaagtttgaagcatttataaggggctggggggatgaacatctagagacggttggagtatagagttcaaggtcaggactggagatttaaatatctcattagcacatgagtataaactaaaggtttattagagcattttatgacacaaaaagcaaacaggagtcaaggaaaaagtacagaatgagaccctaggttcaccaacatttctgaggaaggggaggaagagaagtgaggaagatggatggtaggacacagctaacatttcttgtctacataaagccagcctgggatggtgtggattacccttcccgcgccccccacccccacccctggccccactgtgctgaaacagaaaaaggacttgtctaagttccaacagctggtaaatgttcccatccaaagccaggacttgctccattctgccaccccgaggaagcttgaacgagcatgcagtggagtaagggtacaagttgggcagagatgaaggcggtgcagaaaccaagcgagtgaagggtttccatacattagagagtcaaggacagcaaggtttgatgagactcttgtttttcagtaggaaggaactttgggggtaggttcaggttggtaataggagcaggagagaaggcagtggggcctgaagaggtgtgtcttgcttcagatctgtgggannnnnnnnnnnnnnnnnnnnnnnnnnnnnnnnnnnnnnnnnnnnnnnnnnnngtgctatgtatgtgtgtgtgtgttgaccacaataacaactcagtatggaaaataggcattattaacccccactggtaaaacaaacacagggaaactcagcagtaggtaaatagcttccccaaaatagaaatgttgtaagaggtcagctgggaatgggaagcccagttggcttgtctgggagtcatggtccttctgcccagtcaggtgcctctcggcatgatgagaaatggcacagcggctgggcaagggctctgtggaaaaccagcggggaactgttaattccacctcagagaactagacagggtttagcagaggggatgatatttgacctgggccttaaaggctgatgaggattcagtaggctctaaaggaaggggagctgtagcaagaacaatccgtacccagatgtgcctagactatcaggaggtgtgagggtcagcagaggagagatgggggactactgggaattaggactgagacattgggtcagggccagttggaaggatttcctttaaatgccagacttgtgtgccatggaaggccacagatgtcacagagaaagctttaaggctacctaatggaggatggactggatgtgggcaagagctgaagtcagggaaccaaggagacagattaagacagattaaaggtgcacaatagcccaggccaggacgaggatcccaatgggacagcaacacagggaacggagacacatagttgcatttgagaagcagtttgagaactcggtgagcaagctgggcgtggggtacaaagatatgggagagaacaggacagaatggtcagaacagatggtatctaagagagggagaggagctgcagggtgctgggaggactgatgggatttcagcctggaccgtgagtttgaagcatttataaggggctggggggatgaacatctagagacggttggagtatagagttcaaggtcaggactggagatttaaatatctcattagcacatgagtgtaaactaaaggtttattagagcattttatgacaccgttcagaaagcaaacaggagtcaaggaaaaagtacagaatgagaccctaggtttaccaacatttctgaggaaggagagaaagagaagggaggaagatggatggtaggacacagctaacatttcttgtctacataaagccagcctgggatggtgtggattacccctcccacgccccccacccccacccctggccccactgtgctgaaacagaaaaaggacttgtctaagttccaacagctggtaaatgttcccatccaaagccaggacttgctccattctgccaccccgaggaagcttgaacgagcatgcagtggagtaagggtacaagttgggcagagatgaaggcggtgcagaaaccaagcgagtgaagggtttccatacattagagagtcaaggacagcaaggtttgatgagactcttgtttttcagtaggaaggaactttgggggtaggttcaggttggtaataggagcaggagagaaggcagtggggcctgaagaggtgtgtcttgcttcagatctgtgggacttcttctccaagcccacatatgcaaatctgtcctttctagcttggctcactttatgctgataatagcctctctctaggcatacgcccttctcatcccactccatgtattgtgcaacagtaaaaaacattaattatcctggcgaaggcaagcctagccttccccccgcaccccgtactatgcaggacagttggaagcagacaagcctgtcagcagatgaacactgtctccatcttagccctgctgcagtggccactggagatacttgggaaaccaaacctttctgggttcctgtgaccctgaagaagccacgagtgctcactaaactttggtcttcttgactgtattcaggggagctgctaaaggctgccgagatggctcagacatgaagagcactcacccacagctctttcagaggacccacaaggcaactcagggttggccctcttctggcttccaagggcatcaggcacatgtgtagtacacagacatacagacaacaaaacacctatacacataaaataatagaaggaagaggaaaaaggaagctgttcagctttgactgtcccatttccacatatccaaactcctaaagcaatctcccagacaactcagccatgataaagtacacacatagtcccagcacttgacagatacaggcaaaaggatcctgggagtctgaggctggcttggactgcatacctcaagaccttgtcctagagagattagagggcagggagggaggaggggaggagggaaggagggaggaagagagggagaggagggagagagcaagcaagtgagatatagacagacagacaggcagacagacagactggattggggaagaactcagactctcctcctctgccaatggaccctcatcaacctgtcaatctgctatagatgttttctggctgtttaaacatccccctctaaagcctgaacccagttttttctgtctcttgcccttactctcttcttctcacacacacacacacacacacacacacacacacacacacacacacacacacacacctagtagtttaactttacataatctggagaaaggaatggggaggggaaaccaacactgctttttctttctgccttctccttcctgtcaggtgatcatggtgaccggggatcaccccatcacagctaaggccattgccaaaggtgtgggcattatatcagagggtaacgagactgtggaagacattgcagccaggctcaacattcctgtgagtcaagtcaatcccaggtgaggctgttacaaagaccgcattgctggccaacacatcatctcccagagaggccccgagtgtcccttgggaatatctggacagcatccctgggacccttagactaaagtttttcctttgacagcccaatggctggtccctcagacaagcttgtgttcaggctgtgccaccgatgagctgtgtcaccttggaaacatcttgcagccctgatctttcattttctcagttatgaaattcagatgctgtccacactgcagttgctatagggatagaatctgcctagcaaatggtacttctgcttgcacgggaaggatgttatgtctcctctgagagaaatagcaggactcggcttcacaaaagggagcacagaagcaatagtagagtcccacctcccagaggaactaaggcacacagcgggtgggcggggaagggcagcaagaccggcatgagcatagatgctgtctctgctcctaccctccagagaagccaaggcgtgtgtagtgcacggctcagacctgaaggacatgacgtcagagcagctggatgagatcctcagggaccacacggagattgtctttgcccggacctcccctcagcagaagcttatcattgtggaagggtgtcagaggcaggtgagcaagacagtgagaggcagagacagggccaagtcaggagccagaagggcaaggactcgcttctcaagcacctttggtgtcttccccccatcccagggagccattgtggcagtgactggtgacggggtgaacgactcccccgcgctgaagaaggctgacattggcattgccatgggcatctccggctccgatgtctctaagcaggcggctgacatgatccttctcgacgacaactttgcctccattgtgacaggcgtggaggagggtgaggaggctgtgtaggctacatgacatccaggatgtctgaaggcagaccttctctttcctctgactttcactctaagattccacgctgccacagctttaaaccttcctcttagaaaaataagcagccagccacagctcaggggctagggtggggagggtcccttggatctccctgacgccctcagaacctctccacaggccgtctgatctttgacaacttgaagaagtccatcgcgtacaccctgaccagcaacatccctgagatcacccccttcctgctgttcatcattgccaacatcccccttccactgggcactgtgaccatcctctgcatcgacctggggacagatatggtgaggccagagggcagagtcgagccagactaggcagtcccacagaataggggtggggtgagctgcacccaggcacctgactagatcctgaccagtagacagcagatcagcacaggcctggaggaatataggaattctctcttcaccacactctagtactggggattgaacccaaaactcactcgtgttaggcaagcactccacccctaagctatgtccctagtgatgacaggagcttatataccaatgtgctgaattctgttggtgcttcactgagcagtttcacagacctcttcatataccttctccctgtgtcctgtgtgtacaggttcctgctatctcattagcatacgaagcagctgagagtgacatcatgaagaggcagccacgaaactcccagacagacaagctggtgaacgagaggcttatcagcatggcttacggacagattggtgcgcccagccagggcttgggagggtatcccctaaaggttgcttctagttcccgagagagatgagtgacgggtcaggaaagagtccagctgccggagagccagagacttccatctctgtctccaagggatggccctttccctcccctttctctactcaagtcccaccttttgcttacaactgctttcaggcatgatccaggctctgggtggcttcttcacctactttgtgatactggcagagaatgggtttctaccatcgcggctgctagggatccgcctggactgggatgatcggactaccaacgacctggaggacagctatggacaagagtgggtgagtggggctgtggacgtgtgccgcagacgagaaggggcgggactgaggctgaggtcctggttggaattggctaggagcagccaagaggctgatgatgggctaagtgccaggtttaacaagtgtcccttcctctcttctgcccagacctacgagcagcggaaggtggtggagttcacatgccacacggccttcttcgccagcatcgtggttgtgcagtgggctgacctcatcatctgcaagacccgtcgcaactcagtgttccagcagggcatgaagtgagcacctatcactaccggtccctaccaggcagaggcctctgtacatagtcaccaacccacataggccaggattccaacaccagctcacctaagctcccagggctcaggtttgctaaggaactgtctggttgtaataacatacttaaccttggcggtgttagaaacagatcaaaagtgaggacggaatggcaagactctttctcctgagttgtaacattgctcggaaagttactttgttatcgtttcctcccttcatgttcatcttccatgttttctttttgtctttcttcctcctccttccttcctcttccattccctagttaaatggcatccattccccagttctaaatcctgggtcaggtctcctgtactccataccaacacttggcaggtagccgggtttatagcattgatcttgtgtgctgcatctgcctaggggcacattcaggccttcctacagtgtggcaccatatgcttcccagggaatcaagtgtctcactctaatcttaaaacggctcctccaggtgggtatcattggacattgtgtgggcaagaagttccatgaggttcaatggttaggccaagcagctgctcatggttgtctgggttggtctcttcaccccacattgtagtatctcacctgtcatgcgtacatctgtcacctcatccacacgtgattttaacacagataggaactgagtactgaaagagccaggctcttttttcccctaccataaacaaaggtcactatctcagggaatctaagaaattaggcacagacctgtacaagacacttataaggaagtatgtgggtgacacaggaagtagagacagagccaaactgattcagtcagtccacagagaggcaaataagaacgatacaacatgagcaggaagctaagctaaacccaggaagaagcattgatacccataaaccacctcgccagaggcggcctcagagtgcccaggcctctagaccgttagcagtcctcagagatactgtcagcaacatttcaaaaggagatgtgaaaccaggctcttacttgcaagaatctgccaggttttctagtgggtcatccttagataatccttagtgacagcatattaatccatattaattcttggaacccatgaatatttataataaattttaatacattcaccactaacaagtataaattgggagacaaaaatcaattaaaatatgggctgtgtggaaaaggaacaatgagacatccctgtgtcccctccagccttcacctcatgcggtttgtaactgaaggaaagttgtcttcttttctccttattatacatagagagcaagcacacagctccaagaaattaagctctcatcagtcacccaaagtcaggcaatggagaagccagccacacttgacagatctgactctaggaactgccctcagcactttgctcggtactacttttaaattctgatgcagacaacataggttaaccatttcctgtgtgctatcacaggagcaagccttggctgggatcagtatctcacaagcatcctcttcattcagggtctgtgataagcaaccacccaggtcgaaggagatgccgagaaagagggctcggtccagaggagcttttaaagacatcttgttgggaagacagcatcttcccagcctgcggacctagcgcacaataacaatatcatatgttgcctgtggacaggcccctgttgactacaacatctctggcacagagttacataagaaataactatttaatgagcacacacacacacacacacacacacacacacacacacacacacacaacagtaatcagaggtgaacagaacaagcagaagaaaacatttgtttcctttggttatgtaaaacatgagagggggtttgaaagggacttggatgaaggacttcctcacattccttctggctcctttcccttctgtccccagggatgtccctggagttccacctcccgctatcctcccacaaatctacctgccttctttcctttgtctttctaggaacaagatcctgatttttgggctgctagaagagacggctttggctgcctttctgtcttactgcccgggcatgggggttgccctccggatgtacccactcaagtgagcgtctctctagggctgatggagagggagcaagatggactttaattctacctttgtgacactgttccagcctctgaagctcctgacacttccctctgttgcttccagggtcacgtggtggttctgtgcctttccctacagtctcctcatcttcatctatgatgaagttcggaagctcatcctacggcggtaccctgggggtaagcatgtccactctgcagagaggtctgtctgacctaaggtcccaggagccctgagcatgcccaccccggcccttttcctctatatcctgtatcccatctaccttagggttctctaaggcctccactttcttctagagcagtgcttctcaacattcttggtgctgtggccctttaatacagttccccatgttttggtgaccccctcccccactccaaccataaagttatttcgttgctacttcataactgtaactttgttactgttatgaattgtaatataaatatctgatatgcaggatatctggcacgcgacccctttgagacagtagaccttgggaggcctttgggcctgacctagttcttgtcttgacttcaagcggtggagttttgctttgacctgtgaaagggtcatttgactccccaaagaggtcacttcccacaggttaagaactactgctctagaagtccaggttcgaatggtcaggttagaagggcccttcaaggtcatccaatcctctacacgcttgctgataaaaacgatgcacagaggtgatgtatctgtttaggatcataaggaaacccaaacacagagctcccgattcccaggcatcaaccaaggcctggttcatgttccttagacacatctttgatcatttgctgggttgaaatggatggcctacaaaccacacgcgggctacggacagtgtttggtgtacagtggcccaatattgtgtatgtgtgtgtgtgtatgtgtatgtgtgtgtgtgtgtgtgtgtgtatgtgtgtgttttaatgggcccaatatctaaagctttggcgttttcacatggaatctaaaatctgacttctgaaacaaacattaaggccgtcagtctctgtagcaccagcgggacagctgcctccttaaatgcttgctacctgggaagcccagcaggcattttcagcatctaccacatgaaatacaagtctcccctgaagacagacttgtcccctccctcccagttaagaacatccagcccacccagcaagcccagggctgtcctttccctctaccctactcccctggcttcttctcctctctaaactcagctattgaagccctggtcaaccctaaactattcaggccctgggcggggttgatcttttgcctccttttatgctcctgctgcaacctttatcctatctctccaacaggctgggtggagaaggagacgtactactgagctcagcggcaaaggaagaacgaggggcagggggagatggggtgctggggattgtggtgaagggagggactggggagtcagaaggaggcacctgagggaactaagatggcagccttgggcaaataaacttgaggagactgctccagctgctccacagatcccgctgtgaaccctgggacagatcacctcttcagatccttcccatcccactctgctacattttccgaaaaactaggggtcaccccagcccttcaccctcacctgtattattcaaacagatcaacacccaaaggttaatcccggctaacccatgaggaaagcctctcaagtcaccaagtgtcagtgacccttggcttcattcctcttcccattctcgcctcccttcccttcctaccctgctcctccccctcacaccttgaaaacacaaaattctccttctgtgagtacaagagcctgggaccagaaaaggaagccaggtggagagattaggtctgtctcccagccaaggccagtcaggaaccagaggggagctgggctggcaaggaaaggttggggtgtgctggctgaaggagagaaaggagagaaaggaaagaaggaaagaaggaaggagagaaagaaagaaaggaaggaagaaagaaagaaagaaagaaagaaagaaagaaagaaagaaagaaagaaagaaagaaagaaagaaagaaagaaagaaagaaagaaaggaaagaaagaccacaggtttgtcatcttcagcctccaggtaggtggggtaggctctggctctgtgtcctgcctttagagactagcacaccagcaaaccaaattcccatctcgtcagagtagcagtaagggcaagcccaggggggtagtgtgccacccagtgacccattgatccttgggtaatggtcctctctgtccataaggctcaggagtcacagaaggtccagctatctcaaccccacactcttgggaacacctccccgcctttttagaacagtaagttctctgtggcctcacactgttctgagagccccattagctgccacttctccctgtgctctctcattcccttctgcttcctgcacatctgctgaacccacgtcatttccggtactgcctagttagtcctggaaaaggctctcttggccattggcaggaatcagtgtagaaaagtttccaggacatccctggctttccagagcatgcagaatcagcgtagctcatgacactgtcagacactttagacatgagagaaattcttaagagacctatgcctttggcctctcagatggcacggccgctgtacacagggaagtgttcactttccttgagacgggaagctggcttcaggttcctatggaatagagttttctttccttattcccttttcacctaacagttttgctcttcggacagctgcccattccctaagcctcgcctagaaaccatagcatagatgtacctagatgaatgagccaagcaactgagaaacagcaaggaaactggaaggcttgaggtgggaatatgaaggtcaagacaagaattagggagctgaaaagatggctcatcagttgactgctcttccagaggtcctgagttcaattcccagcaaccacatgatagctcgcaaccatctataataggatccaaacactcttctggtgtgtctgaagacagctacagtgtactcataataaataaagtaaataaattaaaaaaaaaagaaaaagacaagcattaggccagggccacgggcctcccaagggcaactgtctcaccacagtggagttttgctttacccataaataccttgaactttttcagtcatgtgtggccttcagttggaagtctaaatgggacaccatatttatttgggcctgattaatttgagatcattgactttgaacaaaagtttacctcccgcacaatcaataaagtcatctggtcggtaaatgaagagcataaacaatattgttaggagcggtatatttagtctcagagtatgcttctcgagcactttagaaatctccctctagaatcagcaagttcaccggctaattattctcagccctgatctatctgttaaaggaacgtctacaaggtccttactagcgaccttctgtgagacattagtttgaggcagtacatgtatacttgaaaataataaagttgcatttctttatgaaaatttacaagagaaactgctcccatggttgatttctatacttaatattggccttcccctcagactgttgtactggatgtgtgcatggaaggacttggcttgctaagggaactcgagcggcagggaagtaatcctgccacagaccatgctctaaaggggagaaagttaaatttatatatcctcgtcctcgtagccaggcccgccaggagccataagggtttgtccaagacagggaagagtagctaagggtccatgacaggcaaggacatttcaattattttttctgtttcagacaaaatcagtccactcccaatctaaggggcatggaatagaggttttgttctggggccacaacagccaagtcagtgctgaccaatagcatatactgtacccagcgccatctttagggaatgaggtaaaatgcagacatcattgaggtctccctgagtaggtatccgagaccttttcgtagagcatgcatgtggtgggcagaaggcgagacactgtgcactgaggtgaggaacaagatggtgaacattcctgcaggagtcggtggggatgggagacagggggacactggctcttacaacccactctcaagtctcagcctaaccatgaaaagcctgccccagtccaagatgtgtaacggcccctttattacaactctcactgtagtcatggtgacggtgcttgtctcagaggttgtcagggtgacggctgctccctcggtgtctttaaaaacatcagttttctttgtaatggttaagaataaacccggattaaagtttactttgaccgcacctcagggcctgggttcttgatggattctctaccaagaacacttttcttttccttccctggctttcctgcctcatactgacattagacattacatctccttgggaagaattctcatggctgccctcaaaacactggcattcctggcatttcttttctcttcaatttgttctttattcataaacactaactcctgatcagcatgggagattcgagattcgacccactctgtgtctggacctaggctgcttcaccctccttgggcaacctggtggtcccctgcctcccagaaggttgccatattgatgctgaacttagtgtgggcatctggttagcatagtgcactacagtccagaactcctagactcaagtgatccttcagtctcagcctccctaatagctgtgactacgggtatgtgccaccaagccaaacactaactcaaatttaggttatgaaaaatggatggatacatggatggatacatggatagatgagtggatggatggatggatggttggatgcatgggtggatggatataatatactacgttatatgcacataacagtggctagagagacaactcactgattaagagcactgagagctcttccagaaggaacagggttcaatttgattcacagcatccatgtattgacccacagctttctgtaacttcagtcccaggtaacccaacacatttttccccctctgtgagcacttcatgcacctggcacacagacatgcatgcaggcaaagtacccgttgtcttagtcactgttctattgctgtgaagagacaccgtgaccaaggaaactttttcaaaaggaagcatttaattgggacttgcttacagtttcaaaaggacagtccattgtcctcagggcagggagggtggcagcacagaagcaggcgtggtgctggagaagtaacagagctacccctgcagagagatcaggcctagcttaggcttttgaaacaccaaagcttatccccagcctcttccaacaaggccacacctcctcatccctcacaacagtccatcactgggaaccaggcacacaaacacacgagcttacaggggtcattctcattgagaccaccatgcccatacacacaagatgcatgactaagaaaaaatatggagagacgcaactgcctgctagaggatcttggccaacatataagagattctgttggatgtgatgctagaaagtagtccaggcttccacccagcaggaagaattccacacagcatgactccttccccaagagaactggacatgtgataattcaccaggagaagatgacaagctaaagggtcaaaatacgaagaacgcatccctacatggtagaaagtcagcagctcaataccaatcgcaaaggaagatgttgaacaaaaagattgtttttgttttgttttgtttttttctctgaaagaaggtctcactgtgtggttctggcatgcctgaaactaaagagatagaccacactagcttcaaactcagatctacctgcctctgcctccagagtgctggaattaaattggtgaacccagtcaaatgagtctttaaaaaacatccttgagctaggtaggcctaaggacatatgtcagtaatctattcacatgagaggctaaggtaggaggcatgtaagaccagcctggacctcaaagcaatactacatctcaacaccaaatgagctgaggagatggctcagcaggtaagaacactcgctactctcatacaggacacgtcttcacttcctagcgcccacatccagagactcacaaatacctgtaactccagatcaaggaatagctgacaccctcttctggcccccgatggcacctgcaaacatacagtgtatacacctacacttgagcacacacatacccataatataaaataatcttttaaaacaaaaacaaacaaaaaaccaccttagtttcaggattcaagtgtttttcccttgaattcttctaagaatattcttatattatttaaaccctactagactatagagagaaaacattttgaattgcctggcttattttatgagagataagtgtcattttaataacatttttataatctgataataactccatgggaattcagggaagtgtatgagaagacagctgtgaggaacaattcatcaggactgaagccacgtgatgaaacactcatttcaaatggctatgagaagggtatccctaaaactcagcatctactcctgcctcaaacagtgaggaaaagaaaacatactgagaaatgtaattgtgttcagaaaagagaagaaggggagaagtccggaatttgatgtcagcctttgaaaccctgagttaggaaataacactttaaaacatggaaacggtggctggggagatgtgctgaagagattcgtgtcaggaaagtgcttgccacacgaacatgaaggacctgggttcagaacccacccaagcacacatgtgaaagaccaggtatggctgaatgcatctgtggtcctgacacagggagatgcacatgggacaattctattgcttgctggccagtgagccttgctgaatcagggaattctgagttcagtgagagattcttcctcaaaaataaataaataaataaataaataaataaataaataagatggagaaagattgagaaagacaaccaacttctaactgcgtgtacttaaatctacctacccagacatgaacacacacacacttttaaaaaaagtaagctaagcatagtgacccacatctgcaaatctcagcatttaggaagttgaagcagaagaaccacacatttgaggccagcctgggctacatagtgagactatctttaaacacacacacacacacacacacacacacacacacacacacaaagaaagtaaagagacaaacaataacaaatgaaaaaatattttttttgaaagagcacaactgcctataacaccaagaaagtcagcttgtggtggtttgaatgagaatagtcccataggcttatcatatatctgcatgcttggtccctgttggtagaactgtttgggaaggattaggaggcctggtcttgttgacagaggtgtggcactggggatcttgaggtttcaaacgtctatgctgttttcagctacccctgcccccatctctctgctttgtggttgttgtctcaatatgcacacattcagctaccactccaataccacgcaggcctgcctgctgtcatgctcccatcatgatgatcacagactttggaactgtaagccccaataaacccttctttcataggtcgctttggccatagtgcctcttcacagcatcagaaaagtaaggaagacccaacccaaacagaggaagagcagcagcagcaacgagccccggaagcaggatgctcaaagtcacaggattcaaaattcagtcaaatgcatcttctaacactagagacagaagactgagaacaaaggacttacctttgcaacagaatcaaagcaaaccaggctcgagccttagtgtgttcagcacattgatttaaagcaaaattaaaataaggaggacaaaaataaaaatgggcatacatggagagctactgctggctgctgttcaggaagactgaaggcacaaagagaagcaagttgctctaaaggagtcagtccaacttcagtcaaagccctcgctgtatttttaatgaaatataacacagtttgtgacattcagctgtaatggtaaccaggaagcatctgacttttgtttttaatggatgtgagtacacactctcggtcttcagacacaccaggagagagcatcagatcctatcacagatggttgtgagccaccatgtggttgctgggaattgaacttaggacctctggaagagcagccagtgctcttaaccactgagccacctcttcaaccacagcatctgagtttttaaagagtaaattaataaaggctgatgcttagcctatttaatcacacagattttaaaacacttctggcctaagtggcttcattatcgaaaaaatcttaacaaagatgaaatctgaaagcttaccacttgactttgattcgggaactacttgtggattggctgctctgagccaggcctgctccataggcctggatacagccagcaaaggtcctggggaacaggcaattcgtgagtccacagattatgggcaggagcgtctcagagggtgagtgtcctgtgaagggtgtctaggcttggccttgccagaggccctgctttgtatttcgccatcagagctttctctggaaaggtcagcctttgggctaagatctgtggatcgcaatgagcattccgaaaacaatctgaatgaatgatgtcccctctgccctgcctctgcacagtaccaaaagagaaacgtaaacaccctcgtttctcaaaccctatgatccacagtgctctcctgcctgcaagatctgctagggcaatggggacacaaagcttgtgggagtaaccaaccaatatctgatctgacatcgcccactccacgagatgggacccataccccacactgcttgggtgaccaggaacctaagactaggaccaaataagactggtctaaagaatgaagtgtgtgtgtgtgtgtgtgtgtgtgtgtgtgtgtgtgtgtgtgtgtgtgtaagatgactcctaatgacattctgctatactcctagagcagtgctttgctcagccatcatcagagaagcttcctcctgcagcagatgggaacagagacagagacccacagccagacattacacagagaataagagaccttggaacactaaaccttaagtgggatgtgtccatcaaattcctcccctcagagctcaggggagccgtgtggaagagaaggcaggaagaatgtaaaagccagaggtgacagtggacagcaagagaacaggccctctaaaccaacacacgcaaagctgacatgaactcacagagactgaagcagcaagcacagggcctgctcgggactgcacattgggtgctctatatttacattatggccttaagtttagtgtttttatggaattcctaagtatgtgaatgagtgagtgcctgactctcctgccttctcctgggctcttttccctctgttgggttttcatgcccaacttccatgtgatcgcttttgttttctcttttacattttatttatttaaaaaagaatgaatgaatgagtgaatgaatgaaaatctagccactaggataaaggtgaaccgcagaactgtcatttatacctgctgagagcaggaaaaaaatcagttttttccagtggaatgacactgggtatatcaaccacaccagggggaggtcacatgatcaggaataattaaccaacaaataacggattctataggggtgtgtgtgtgtgtgtgtgtgtgtgtgtgtgtgtgtgtgtgtgtgtgtgtttacttttatttggttacaatttgtgctttttgctttgttttttcttttggggagtgttgatgtattttgctttctagcccgtttggggagtttattcttatactaatggttttgttttggttttggttttggttttgttcttgagaaagaacttaaagttaggtgggtatggagaaggagaagatctgaaaggacttgggagagaagaagatgatttaaaattgaatatgaccagaaaatttaaaaatggttttatataataaaatatttttaaacaaacaaacaaacaaaactcagagactgtgagaaaacattgacggtgtaagtggcaagaagtctaacaactcaatttaagaaaaagaaaacaatgtaaaattgaaagaaaacaatgtaaaattgaacaaatgatactatagctcacaaaaagaaaaatgcaacccagaaaacccaccattatattggaaaatacttgcacagacaataaagaaatgcaaattagccaagcccctcgctctccagaagccaaggtcaccccagtgaaccgtagacttccttatcttattgctgagctccagggcagtgcccttctaatagcagctggcagaatatcttaagattttaagtgagcttaccttatgattcagcaaaggaaatcgattctacagaaatagaggccaaagccacctctaaccactttgccagggtggcagtgtttttcacggttaagaaaacaaatggaaaatagtctctctgtgtctcagcagcaggaacaaccacacacaagcacgaacaatacagactactacatacggaaaacctacgagaccgagagacgggcctcagcgcctgctgagctcagaaatgaaaagaggggtgaagattgaaaatgcagctctcctggggttctatttgaatagacataggaaaaactgggaagctgggcagcatattaacgccagttacgggaaactttgggaagggaaaagggacttctagcttttattttctactttttttttttaatgcaagatctcactatgcagcccaggctggttgcaaactcaaggttctcttggttcatctcctgagtgttggctgagattattttatcctatatatagcagagatgtgtgtgtgtgtgtgtgtgtgtgtgtgtgtgtgtaggccagagattgatgcagggaatcttctattgccttccaccatatcttttgaagcaaggtctcactgaccggggatctggccgatccagctagactggctagccagctagctccagggatcctcttatctctcaggcctgtgagcacagacatcatagtcagtgtttaacctcggtgcttgggatctgtaccgaggtcctcaggcctgcatggcaagctctttgcatatggagccaccaccataaccccatttattttattctttttgctaaagaaggaagaaattttctgaaaggaagagactaacctctgtttgtttgtttgtctttttggcttggggggggggcattttgttgttattgttgtctatctgtttttctatgtggctttggctgtcctgaaactcactctctagaccaacctggcctcgaactcagagaacctcgacctctgcttccttagtactaggattaaaggaatggaagggccaccaccactaacctgggttccatctgggaagggaacaggtgcgaagaactacatcagtacagtgatagacgtttccgggtacccttatagtcacaaccacacccacccagccaaaatgcaattaaacaaataccaaataaccgaagtgtatgggatactataactgaaaaaaatataattgacagaaatagatagctgcttcggatccttttgaataaagtatttaaaaaaataattatcacaatgcagtaacaattagtgagaaaaaaaagaggccaagaatttgaaagagagtgggacagacagatgggggggtttaaggggaagagaggaaagagtattaaacacaattagcacataaaagtcaaggcgcttagaaagagcttagagcgggtcaacagaagagctgaacgcatcatttaattgtgtacatttttttttgtatgtaggtgtatagtatgaatgtgaaggtcagatgacaacttgcagaaggaaattggttctctccttctaccccgtgcatgggtcctggaggttgaacttggaggtcgaacttgtgtcgtcaagcttttcaaccagtgctcttgcctactgagctatcttgccagccaatattgtacagtaagggatgactgtacatcacatgggacagtttttattttcactgagaactgcacatgtagctgcatgtgaaacagtgaatccaaactattcattgaacccagaccacgtaccaccagaagttattttttgtatggagcaaggcttctttaagtgtccccctcttttctcctgagatatcgttatacaactttacatactaatgagaccgatgcactcatttatataaagagctaaaccttggataaatatttgatattacccagcaatatttttcagagttgattgatcaatgtttttttattatcaaacacctgtgctaacaaagtcttttcttgctaatatgcagtgcaaaatagaagtatgtttcaaagattgctgtaaaagttatcctaatctcaagccaaaactcactcagtgatttttttttatatacaattttaatggaacccaaggcatcaaacattcttgcacaatgcaatccaaaattacaatacttccacaccaaggaatcatgggatgagaatattagaggtcattttcttcatgtttctataagaacagaaaagtttgtttgtacagtgaaaacaccaaatgagggaggggcaactcagcagtaaaggaacgagatgcccaagccagagggcctgagctctcaacctctgggactcgcgtgataaaagagaaagactctcacaggttgtcctctgacctccacacaggcactgtgccatgtgcatgcatgcaacacacagatacacacagatacacacagatacacacagacacacacacacacacacacacacacacacacacacacacagacatgcacaccacaaactgagctacagtatttctggcaacatttgttacacccatacaacagtgccaagtgggcatggcatttgtttagaaccaaagctatagagaagctgcatgacagaacaggagtgggcaccggcagaaccctgattcattgcatgcttgatttcaaacaaatcttttgttcttttacactgagaacctttttattgttgcccgcgcactcacacacgagtgcacacacatatggccatttagccgcaccaccagttatagggtggccacatacagtttgaaaagctaggatgtagagcacctcactttaattctggctcttgctactttacaaggtagaaggcattattttaacagaacaggaaagtacagaagcgggcagtgaatttgtacagtcacacagatgttagatgaggactcagtattcagacacagagtccatctctagaaataaaaaaataaatacagtattggccagtagctgggcctcagtagagctggaaatgtcagctcacggcactaaccccgacgctcagaggatgcagagacaagagaatcagcacacgttatagatcataccagtacagagcaaattctaaaccaataagggctatgtagctaggctacacacacacacattactgttttgatttgattgagccacctaactggagtgtcgtccctagcctcagaagtcacaagaccatgcatgcgaagacttcgttctaactttgctgtctgatctaaattctttgagccaacctgctccagtcaccctcacccaggtggagggaggtttgtgcgttcttggttagagctctcatgagcccattatgatgccaggcctaggctgtcgccatagcacccagaggacccagggctgggagcaccaggcctgcccagaagctcactctgacctcggctcccactgcacttcccacctgctgaacccctgcatcttcatcatttaggtacctgggtaccctttgtgccagtccctgctctttacctcaccctctcattcagagtctagactcactccacttggcgcttccttctccagctttaccactcagacttgctcccttcacctttcctttcctatgcttatagatagccctctctaccttcccactccttggctgacctttgctctttccaccacactggcctcaccaccaccacccccaactcctcaactcctccccccactcactcccctacccccttaaccctcttttgctttctttccaccggttgagcagagccagctatacctagagatcatattatggagcctggaaaagaaaaggaggtagaggcccctggtgagctgaatcagaaaccaagacccagcaccaggtcctcaactacaaatagacagccgaaaatgaaaagaaggaagaaagatttagaagagctgaagaaggaagtggttatggtgaggatggccaaagcaaactgcccttgaaagacccttcagcctttgcctgatggcttccacatcctacctggagaagaagcaaagcacgcttccaggacggtcccctccaaccccctccttcctccctgcacatgacctgaggtcaccatctcaccttaatgactcttctgttccctcaggatgatcacaagctaacgttggatgagctgagcgccaagtactctgtggacttgaccaaggtaagaactgcttgaagcagaacggaagtcctcagtgacttgaggacactaaccagggcagcgcagaagctgaaagtgacccccactctcaactccagatccaactgtgtacctcttacccttagccccacaaagctccacacaactctacttggaaaaaatggtcacagtaactatctgagaaagttgtgatggtgtggatggttgggaatatgccttttgtcttgtcctctagacctgtttatactcttaggatttatcaagaactccaaagagcttttgcttaggtaaaaaataatgttattggtatttgccatggtaaaaattttaattggcaaattttaaaagtatttctgagttcctttataaagagtagttgctggaaatgtggctcagtggcagagcatcttcagcctgagtttgatccctagagtcatgaaagaagagaaggaaaaaaaggcttattataaactaacagcaatatttttttaaccaattaactatttttccaaaaaaaaaaattagtgtcatcttacattttacaaatctctttaatacctaactttattttatgtttgttttcttgagacaaggtcttactatgtagctctgattagcctggaacccactattatgtagatcaggctggccttgaactcatagaaatccacctgcctctgctgggatttatgtatgacactatacccagcatttaatttctagttttctaatagaaaaatctgaattctcataccttttgatattaaatctactgggatgtatcatgacatctttggaaaacttcaagtgttatctttctattagtgtgacaaaatatctgaatctgtggtgtttggacaagaagggtccccatagatttatatttgactactttgtcctcagttggtggaacttcttgggaagaattagagggtgtggccttgttggaggaagtgtgttactggggctctaaagttttaaaagtccagccatccccagtaagctctgtctgtctgtctgtctgtctgtctgtctctgtctgtctctgtctgtctctctctgtctcccgtctctctgtctccctgtctctctgtctctctgtctgtctctctctctctgccttgtatctgtggatcaggatgcaagctcacagctacagcctgcctgctgccataatccctgccatgatggtcatggttctaaccatctgggactgtaagccccaacaaacactttgttgtgtacgttgccttggtcatggtatctcttcgcagcaatagaacaaagtaacttaagacagagacaaacaatgtaaaggaggaaggagtcactctgacttggagctaggagggttcaggccagggtctcttggctccactgctcacacttcatctgtggggaggaaggaagccacgtgatggaacacagctgctgacttcatggcaaatagggagatgaggggagaatcccaacatacctttcaagggcacctcccagcagtctatttcctcccctgaactctcccgacagcaccctcacaacaccaccatcagctgggcgtcaggtaatttggggaatatctaagagtcaaaccataacatttaccatacacttttttttttttttgaggcagggcctgactatgtagatcaggctgtcctgaaatttggtggccaatcatccattcctcaaggatgagtaaagatgacaatgatttagtattgttactaaaagctttagactcttgagagaatattgaagccccttaggtctttttgaagacaggctaagggaatggctgataggttctggtagattctattatcatataatattaaggaaaaatcgcagaagcgcatgcataaggccagaataaaatccatacattggtgtctttagtttgatttttcccttgtttccaatttggaaagccaaagtgtgaaggacaagatgtttccagcatcatggatcatggccccagttaatctagtatattataatcatctctatatgtttgtttcccaacttgagctccctaaaaataaggaacattcttgaatttcattcattcaattgattgattattgtgagcacctaagtttatgtgtggaggtatgattgtgccactgcatgcacacagagggcagagaacaacttgtggaattcagttctctctaccatgtgagtccaagaattagacttaggttgtcatgccttgctgcaaccacccttcccttgagatggttgtcatgccatctcagagtccctttgggtggagaccattcctattaatgatgatattctcagctcctaccacatgaccaagcctcaagataaaatactcaagttcaaaaggttgtaaaccaatccacacacaaatgcacaaacaaacaaaaaagctctctatgagtaagcatgctaaatgaaaccccttctacaatacaaattcttattggaaagaatcttcagaaggctcttccgcggctgctttggggtagacctatcctgaggctataaccagtaggtcctctcgctgtaactggttctttttcacagctgcctctccatccttatttcttctctacacagggtcttagtgtcctagaagcccaggatattctgtttcaaaatggaccgaatgtactaactcctcctccaaccactccagagtgggtcaaattctgtagacaactgtttggtggcttctccctcctactgtggactggtgcctgtctctgcttcctggcctatggcatacatgtaaattattacaaagaaaacgccaacaaagataatgtgagcttgctccctccccccaaactcccaaattctcctcacccgaatccccaatagttcagaagtttctggggaagctcttgatccatcttggtctcctgcaaactctatctagaaagcttctagtttagctccctaaaaggcgttattctaccagtctactcgccaagtggccatcacagtgtttctgcagtccctcccttccccttttgaaagatttatttacttatttaacgtatataagtacactgtagctcatcttcagactctagctgtcttcagatacatcaggaggagagcatagatcccagtataaatggttatgatccaacatgtagttgctgggaattgaactcaggacctctagaagagcagtcagtgctcttaacctctgagccatctgtagtcccccatttcttattcagaatgccaacctcttcatctcttgcttcccttggctcattgtccacctcctgccgatagagggagaggaagattctcattctctaggagttttctgaccactcaacataataggttaggtcttcattaccaaggagccggggggccaacccttcccagatcctcctggaccctcagtcccatgacttcctccagccagaggaagttgttcccttggcaatctgaggatgcagagggaaaaaaggatgtgctaatgacactttctccatcttcagctgtacctggggattgtactatctgccgtggtcatcattaccggctgcttctcatattaccaggaggccaagagctccaagatcatggagtcttttaagaacatggtgcctcaggtacgtaggacttgtgtgggaagagctagtgagaggaagtgcagattgtgaggagttatataatcgctcagtccccggggggactgtcacacacagtgggtgcgctaagtggggctggtgatgaggagcctggaaagtaccaggagaaatggaaatcaagctccgatgacaatagccacagagtgtgtcactgaaagtgacaaggaaatgaagaatgaccctccacaacctaaataaggacatctattgaaaacgaagccgctggggagactgaccttaaaggcaatgtatttgtggaaatgttccagtttttaaaaagctaaaaggatatggcgatatgaatattctggtaaagatatgagtcctgggcctgatgctatgttgggaaataatgccttaaagagacattttgggtcaagtgccaaaagctgaaatgtatgcagtaaatgtgagcattgcattaaaatcaaaccacttgagacaatcactgtgctgtcatagaaaagaataacctaggggccaagagatggatccgcaaataacagcacttgctgcttatgttggctaattttatgtccactcgacacaccctagcatcacttggaaagaagggattcagttaagaaatataccagattggcatgtggacaagcctgtggtatattcccttgatggatgattgatgtgggaggctccaaatcactgtggacagtgccacccctcaactgtgtagtcctgggtgctacaagaaagtgactgagcaagcctagggagagcaagcctgaagcagcactccatggcctctggataatgaactgtgatgtggaatgtttaagtgacataaatcctttcctcccaaagttgattttgattgtggtgtttatccaagcaatggaaaccctacgaatctgttcttgcagaggacctgggttcggttctcacatcctgatggtggcttacaaccacctgaaactccagtttcaaaggattctcaccttccttctcttctgccctcgcaggcaccgggcatgaacatggtgcatatctacatacatacatatgtatatatgtacacacatatatatgtgtatacatgcatatatatgtatgtatgtatgtatatatatataatatttttaagagaatgaagattacataattctttgaaaatgcacacagaagtgtttaggataaactaccatgatgcatctaactttgagacaggaaaggatgaagcaactgaggtggacagttagtgagtgaaggcaggtggaagttttataggtgtgcttgtcactattcttattattgaagcttttctgaaatttaaattttatttttttaaattgaatgtttttaaaggtatctggaaatagtatgacagcagattggagttcctaaatacaggactagaggctttaaaacaaaaaacaaaaaaaccatcaagtctcccaactcatgcgacaatatcatcatgttccacccctgtaccctaggatgctcttctcctgttaatgtcaacatgatttaaacctttctttgagtaagagttttgactgggatctgggagtttatcgggtggcactgattgcctaatgtaccacccaaacatgacttttgtcaccgttctgtgcctgtgctgctgctctggtctaagctggcttcagcttgctctagggagaaatagaagataaccttattcactcctcggttgaaaggattgagatgttcgcagctcttgcttgttcatgggaacagaggggttcccaggaacagcagggcaaaccttaacaggaacaattttttttaactaatttatttatttactttacatccagatccaaagtttcccatccctcctctccttccggtcttttccctcttccttcccccatggtccgctccccccccctttgtcttcagaaaaggagaggcctcccttgggtatccaacagccttggcacatccagttgcagtaagactaggtgcatcttctccagtcgaggttagatgaggcagccactcaaggggaaaggtcccaaaggcaggcaacagagtcaggacagcccctgctcccactattaggagtcccacaggaagaccacaactataagatacgtgtggaaggacggcctaggcctaggtcagactcctgcaggctccctggttgtcgattctggcccctatgggtccaggttagttgattctgtgggttttcttggggtgtccttgacctctctggcccctatgacccttccttcccctcatcaggattctccaagctccaccaaatgtctggctgtgggtctctgcatctgtgtatcaaatagttttttaagcctttatttttatcatttctactaaaaatcttctgggccaaaaataaaaaatagtttacatggtcaattctacatttagggacaaagagatagatcccacctcttaatggaaaggccatcaaagtcccattgcagaggttgtgcagacagcaatagcagacctaacacagaaggacagagatggaagtggggagggttggagcgcaaccaggaagtgcaagaggctatctaacattatcttcctacagcaagctctggtgattcgagatggagagaaaatgcaaatcaatgtaagagatgtggttttgggagacctagtagaggtgaagggaggagaccaaatccctgctgatatcagggttatctcggcgcaaggatgcaaggtgaggagatgaggaaagctataggagggagcctacggcaatgtgtggctctaaggcacggtgaagacctgggcttagtcttaatccaatcttcttattcagaaccttgagacagtgatgagagtggtttgggggaaagaaggtgaggttctaggagtgcagatatttatctctgcatgttaatgacatgatggttctgacagataaagtggtgctgccttcatacatgaatctgacctttgtcctatgactgccttttaacctctccttcccatcccaggtagacaattcctccttgactggggagtcagaaccacagtctcgctgccctgattgcactcatgagaaccctctggagacacggaatatcatcttcttctccactaactgtgtagaaggtgagtattgtatatcatctgcagcccaggctcaaaaaaagaggtggaaacacatggcttttaaaaccttctgttttctaaaggtttcggggtaggaagacagtatcaaggttggcttctccatcactcaggtgcttaatgacctctgggggtggggatgggggggggtggtcaaagacatcatttccaaatttgtatactgttaatacaaaaactgctacccatcgattgcttttggactaaatgacattaaatgcttagcacaaggtctattacactgtaagcatcctgaagttgttgaccatggtttgaactggtggagaaaatagcacagaatagagggacattatccatctctgccaggtcactcttctacctccttttaccttccagaggaagctaccaacactgcaagcttgaattatcagagctgtccctcaaactctgccattcaaacactggctttgtccctaggatgaaagaaaggcactcctgagccagcactcacatccttctctcctttgccctttgcccttaaggaaacccaaacatactccagagtctacttgcaaatcatcattaatgcttaagatcaaatgtcttagtgtctgaagatgggtgctttctatggaatatataaatgtatataactatagtgtcaagaacgtcaagcactataaacattttttgttctgactctcacaatgtcacacacaaaactctatgaagtccatagaaattacacgctcaccatagagtatgacccaacagagaagagggagactagagattctaatgaaagtctgtctccaaagcccacgctcttgcctccacttcccacgctgctctacacggagtgctaacgacctctcttcattaaatcgcttcatttgaaaatgtcttaataagaacaataatgttcaatatacactaagggagaacccaaccagaaagaaattatatcatttgatgtatacacaatgtataaaacataaatattgaatgtacagaaaaatacaaattagcaagactcctctttttttaaaaaatgctgtattttagctgttatgttttaggagaaaatttgctcaggtttatctttctgaagtaggtttttcatcagctaagtctaggctgctgacaagcgggttaggcaagagttggtgaaggtactccagctgagaaacaagggtctatctgagagaaagggggatttaataggagacaaacaaaatcctaatgtagccaagagggtagaactagctagataggctaagggattttgttttgtttgttgaaatatctcaggtcttgctatgtagctctggctgtcctggaacttgctatgtagaccaggctggccttgaactcacagagatccctatgcaccagctccagagtgctaaagttaaagaagtgttctatcatgcctgccaagctaagttttgtacaagttgctacgtaatagcctttgccttagaccagtttcccctttaaccttcaccccagaccaatttagaaattactaacacaaatacagcgttatcctgtccccagccttcgttactatggtccttgataggcagtggcacaaacccctctctttgtgttcccatgcttccagggaacccgatctctctctgatgacacatgcaaggtgtacgagggagggaacagtctgtcctaagacacaggatatttgcccttatcagttttcttccggtttgatgctaacctgctccatctccagacacacagggagcatttattacatttaatcatttctagctagatatgtgaacggaatggatttaaacgacactgtagccacctacacccatcttatcaaaaatacaaaatcctttcagtatctttcagtcattttattactttcataaaggtttagagaacctgtcaaccagttcaaaggttgtctgcagtgtgttttacattgtgacccttgctagagtctccttccccataatactggcctaatccatccaagaactctactattagattcttttttaaatagttttgtgtgtatgtgtatgtgtgtgtgtgtgtgtgtgtgtgtctgtctgtctgtctgtctgtctgtgtctacatatatgtcctacatatactcaggagcccaaggaaatcagaagaggcaatccctcaaactgcagttagagacggctgtgaaccaccatgtaggttctcagaaccaagtccaagttgcctgcaagaacagtaaatcctcttaaccactgagccatctcttcagctccatgtgccttgactgttgctgaaggcaatcttagaactggagaccaccagctaccccgcgcccctgtgctagtgggatctgctcctactgagacacatgtatgattttacactgactctttgatcttttattcactggaataaagttgagtgtctaccatacatccaaccttgttctaggctttttcagagatatttgatttcacagttttgtgggttctttgttgtttctcctcttcctcctcctcctcttcctcctcctcctcctcttcttcccctcctcctcccccctccttttcagcctctcaaatactgggtttctaggtgtaactcacaggatctgcactgtgcttcatcccatgtttaataagaggaagccatagtcttaggaatcatggaactttatcttggggtggggggaactacttgtttaaaaagttgatggttcagccttgtgcccttctgcttctgagatgaaagttctttccatgggtttctgtccttggtcattctctgacttgaatggtaggaacaacaggctctatggggcagcagaaagaatggttttaaacaatcttgtttcaaagttgtgggtgagtgtcctgtaccatgtgtgagtaaagtcaactacatagggcgcagagctggtggggggaaaggccctggaaaggctcagggcacaggtgttatggctggtgccacccagcagaggtcagactagctctagtcagaaaagcagggagggggctcctcaaatagtgacactgaggactggagaggtctttgttctgagggagcactgtggggtgcttagcagcctgtggcttgcacccttccttttcctgtctgcacagaacccctaggtcttactgtagggattccccaccagttccccataactcactcagtcaaagtttgccacgaactacctcaaaatagcatcagatgagagctcagtcccatgagactcttcctactccagtctctagtccaagtaataggctgtcatccatacttctgacagggtggctgtgaactgcgattcccaggactttttccttaaggctctcagaagtcagggaagcacgtggcctacattttgcactcgttacagatgataggagacaagtgaacaggcagatgggagacacacacagggcctgggatgtgggcagagatgtggggtttctgtatcctgagtatgctatcctccagacatctccatgtgtttgccaggctggaagctctccaaacacagttgtcttggcttttaatggatgttttattacatagacgtgactggttatatcatttgccattggtaatcaactcaaccgtcagcctctctccccatcctggatgttgggttgtagagctgaaagcccaccctgtaatcccatagctggttcccctggcaacctcctcatccagtggctacccaagagcccaagagttgcctcattaaagcaaaaggttctcttaccacctagggattctatggaatttagaagctctctgtctgatattcctatcatgccagaaactataaagtgtcaggaacctaccatgataaaaaaaagattctcctagcaaaacaaccaaaagattttagaagttcaatgtcagtaactggggtggtgataccagcccaggcaatccttactctaccacagtatggagttatagtgtcttccctcattcataggaacagctcggggtattgtgattgctacaggagactacacagtaatgggccggattgcttccctgacatcaggcttgcaaatgggcaagaccccgattgccaccgaaatcgaacacttcatccatttgatcacagctgtcgcggtcttcctcggtgtttcatttttttggctctcgattatcttgggttacacctggctggatgctgtcattttccttattggtatcattgtggccaatgtgccggaagggctgctggccactgtcactgtgagtaaacaagggtggggaggggtgacctctgagcagacaaatgaccccagggaaaggaagtgtccctactaacacttgttgttaaggaacatctgaagtgaggggtatccctgagatacatagaagcgtcagaagcaatttagttcccacgagcactgcactgccttcctctacctgtgctgctgtgactactctgtctcctccgtgaaagaggaagcaagatgcaacagagaaaggatcatgctccagtctcaggtgcactggctgtgtcggccaaagcacttaagatcatcaggccttgtgcatttgttagtttatagagcaagattaatttaggattactgaattccaccataatggacttcgaggccacttaaaatcaacctttgagccaacactggatgccctctataaaaacccatggaagataactgtggtttgtttctgagggtgactgacatagctcctttgtctcagccccgtcttgttcttagctcactttagttaaactgagcagaaatatgattccctgttccatcctggttttcccaaccagaataagctggttctttgtgtcctaatggcctaagccctccacccccatgacaaccatcatgactcctcagattctccaagtaatcccttaaccattcttcctatgacacggtcttggctctctgtcttactaataacttgtttgggaaacttgttgctctagttttgtttttttttttttttaagatttatttattttatgtatgtgagtacattgtagttctcctcagacacaccagacagaagagggcaccagatcccatgatagatggttgtgagccaccatgtggttgctgggaattgaactcaggacctctagaagagcagtcagtgctcttaaccactgagccatcgctccaggcagcatattctggtttttctatagtcatcttaaaatagaaataaggataacatttagggtgtgttaggactagttttaaaatgctaggaactaaggatatagtgtaaataaattgtaattccataattgggattctatacttacctattcacagcacaatagtttgttaatttttaaaaaccaccttagcttccatttatgattttaaaacaaatgttctggtttaaatgatttccccgggggcttttcagtactgtgacatcctttcccaatgtcattaccattcccttctgcccaaacttttcagacactattggcaagatgccctatccatacatagcactgtataccacagtaaaacgtgacccagcgatgtggtccttgtagagagcggatctgaaagacagggagtggtctgggatggaaaagaggctcctgaatgaaagatctaaatgcgtcccggggaaggagcctgtgctctgtgacagacacaggagtgaggcgcacactgaaaactctcgccatagaccatttcctcagcatcccttacagagatcacaggtgggatttctaaagaccgggttagagtaaaagggaaataaaaataatcaaatttccaaagcaaaacaacctgaccggtctccacctcgattcattctttcccctttcggtggccttaggtgtgcctgacgctgaccgccaagcgcatggctcgcaagaactgcctggtgaagaacctggaggccgtggagacgctgggctccacgtccaccatctgctcagacaagacgggcaccctcacccagaaccgcatgacagtggcgcatttgtggtttgataagactgtgtatgaggccgacaccagtgaggagcaaaccacgggtaacaagtggccctggtagccaagagcggaggatttggggtgggaaggttaggcgatagatgacgccagataaacaggagagagcaggatcgtggacagaagcgggagtgtgggggccataggaaatatcacgccgggcggtggtggcacacgccttttttttttcttttcggaaaaccaaaaagaaagaaagagaggagaagagataccatctctgtgcagtgtttaggtgcgaagacgaaagtgaataacccctgctgcgcgccttatgtagctgagaatgagcttggccctcccagtccccctgactgacctccccctcaacgtctaaccccttgttttaaactccgtgtgtttatagctcttcctcttcttcttcttccctagggaaaacgtttcccaagtcctcagacacctggttttacctggctcgaatcgctggcctctgtaaccgggccgactttaaaccccatcaggagtctgttcccatagctaaggtatcaagttgaagtggaaagagggcacctcagtgactagtatcacctgtctgtccccttccagaaaagtctgcttttcagtggttttctacacatacccttccctccccgttctgcctctctgcttgtccggatggtatacccctgggacttactgtacactcccatccttgcagcgggcaacaacaggggatgcttccgagtcagctctcctcaaattcattgagcagtcttacaaccccgtgagcgaaatgaggcagaaaaaccccaaggtggcggagattccctttaactccaccaacaagtatcaggtacagaactgacaaaggtggcgggagaacggtgggggccatggactcgccagtggggggagctatgcctttgcctccagctttggagcagggcactcgttcaggagcgctggcatcccaactaacaggaaggctcaccacaaggaaagtgacaaacgctaaggagagagaagtaggtgatcaagggagagagtctgagcagaaggctcacccatgttgcctgcaaagagagcacgtcataaaatgctaagatgggcagaggcagctgaggcaggatactgggagtctcacacagctattagtctaaaccagtgtctgctatgaaattcgccagtgtagacagcttataccccccttccctccatgaagtccctagggcagccatcatgagacagttaggagtcgaatgcacgtgtgtcatatttttctctttttgtttgttttttgttgtttgttttgttttgttttgtttccgagactggtttcctttgcgtagccctggctgtcctggaactcacttccagggttatatttttcaccttcaaaaacattgattcattatccaggtaggcgagggagagagggtgagtgatggtcggggatacaaataaggaaatccaaagaagctatgcatggtggttcatataacctccacctattacctcagcagctgagagagggctgaggcagaaggattactctaaatttcaggtaaatttgacctatagtatgagagaccctgtcttaaaaaggaggaggaagaagaaaagaggaagaagaggatgaaaaggaggaaggaagaagaggaaggaggagaagaaggaataggaggaagatgaagaggaggaagaggaggagcagtaatagtccatgcctagggatgggggaggggatgagaatccaagctaacttcaaagaggatttcagtagaaagtagagtccccttgctgaggctggaggcagccttaagctagtttgctcaggcaatggttcctccaactccttgaatttccatgaagaccagacatttgagtgtaacagggttacgaaataagactcctaagtcagttttgcccttctgtcttcaggcataaacaaaataacagtctatatggatttttaaaacccaattacttgtactttctgatggagcactaagggctaagtagatccacacttcccatcgaaactcgccttagtcactgtgataaaaaagagctcccagagctgcaaagaagctgcaaactttattcctactttttttttcctgacacttggtggcctcactaaccagacaggaattctgtggcttggcagagtgtgagtaaggcctttggatgaattaggcacctctccctccatgtggttaaaaataaaagtcgaacatattcatgacattgttggaatgtctaacaaggaaccaagtcccccaccaaattaccatatgagtgcttctgagctactgaataccattcaagtggcagaactggtctctgtggtacacggtgtgtgacaagccagccccactggactcagctccagcaggcactagctctgacaggctttgagtgaactactataattagcttgctccaagggcagagactccagtctttgaaaggaatgtgtcttacttagcctgttagtctcttaccatctctgaaatagattgtagtctgagcatttctgatttctctttctctctccatcttcttcatatcttctttatataatctttattttgtgggaggtggggttcactgtgtagccctgtatgtcctggaactcactttgtagaccaggctagcctcaaactcagaacccatctgcctttgcttcctgagtgctgggattaaaggcatgcaccaccaccaccctgttctttatgtatttttaacaacaacatttttggggggacaggtatggtggtatattcctttaatcccaacactcaggagacagagccatgaggtcctctgtaagtttgaggccagcctggcctatagaataagttccaggccaggcaaggcttcatggtaagacccagccaaacaaacaaacacaacaacaacaacaaacccccacctatttctttttcctttctttcttttctctttttctttttgagacagtgcctctctacatagcctggaactcattactgaaaccaggctggccttgaactcacggagatccacttgtttctgcctcctgagtgctagaattaaaaacatgtaccaccaggcccagccaaaaccccctttttttggggggggggtatgtcatggattccacgcagctgtcaggggacaatctgtgagaccagtcaactccttccactgtcagtccagagaccaacttcaggtgttcaggtttggcctcaagcacctttatttgctgagccatcttgtaagcccccatctgtaatctttttttttagatttatttatttattttatgcgtacgagtacactgtggctgtcttcagacacaccagaagagagtgtggttgctaggaacccaggagctcaagaatggcagtcagtgcttttaacagatgagccatctccccagctccccctccccccatctgtaaccttgtatcaagatttttattccctgtgacctggttagtagagtgaggagctcttgtgctcccctgagcctttttgattcattcaacaaacactcattggtcactgagaatattgagctttgttaatcttaaacagcttcctccttaaacattgtttttcccttttaacgacttaagcatatcttgaacataactaggcattctttaacaaatcagctggaaccacattttacggtccagtagctcaccccattcaacatccaggaaatgcagtctggtctcctctgtgttcccacaattcctttctgtttgctgattctgcctccgacaggggtcatagcaggcagttcccataagtcaaaaaaaagaggaactctgtggggtgcagagagatccaagggaacggcaaacccaagccatctgattgctccctctgcttgctccagattcttctcatgaacctaccttgccttgccttctatcatcagacatctgaccagcacgcacacagcctctcagtgccatctcttgcctgtagaagaatggctacagggctaaattatttaaaattttgcttcagtttcaaagcttgagttttgtttttgttttgcaactcttgtaaaaacaaacaaacaaacaaacaaacaaacaaacgggactggagagatgattcagtgctaagaacactggctgctttcccaggggacctgggttcaattcccagcactcaaatgacagctcacaagagtgtgcaatccgagtgacctgacaccttcacacagacacctgcaggcaagataccaatgcacacagtaaaagtcaataaatcattaaaaacaaaaataaagtagccaagataagatatttttactctatagaatactctataggaactaaggtttcgcaagatcaggtggacttagctgagttcacaaagcagacaagacatggatgcgggctctagaacaatggaccttgagttcatgtgagccatccagtcaacaaggaggcagggagaaagagtacctggggtgccctcagagaacttctgagaggataagagattcctgtgcaaatgaaggggctgcccctcccctgcccccttgagtcttcactggcttggtggaaggtgggaggtgggtatgaaaccagtttccagtctcttaaccttcaaaccctccccaggattcttgccccctccgtcccatctggttctaccattacatctctccctagatgtccatccaccttctggaagataattccgaagcccacgtgctgctaatgaaaggcgccccagagaggatctttgatttttgctccagtttcctgctgaatgggcaggagtaccctatggatgaggaaatgaagacggacttccagaatgcctacatagaactgggaggtctgggcgaacgcgtgctgggtgaggagccagggagagggctttgaaaggacaccattagaatggctatttgtggggtgaacagcacagggtgttggggttgtgccgagggacacattgggtgacagctgaacccttcatctcttctgcagggttctgcttcttgaacttgcctagcaatttctctaaggggttccagtttaataccgatgagttaaattttcccatggaaaatctgtgtttcgcgggcctcatctccatgattgatcctcctcggacggccgtgcctgacgctgtgagcaagtgtcgaagcgcggggatcaaggtaaattcctgccctcccccaaagccctccactcctcacagcttgaaggaacaagtagaacgctcagtctagagtaggcgcccaatactcttggcctaattgattgctgcctccttgagcttacggtgtctgctcttcggagatgtcaaacagcctatcttgaattgagggttaaaatccccagggaagcttgaaaagtcagctgtctaaactatgctccagaccttgggatgactcttaggcatcagtacctcaaaagtttctggaaactctagtgagtttgaaaccactgtcaaacacagtgcttcgaccaatgtgtaaatgacctttctgtctccctgttcctgcctcccctcccctcccctcccctcccctcccctcccctcctctcctctcctctcctctcccctcccctcccccctccctcccgtcccctcccctcccctcccctcccctctcctctcctctcctctcctctcctctcctctcctgtcctctccccctctcccctctccttctctctcctctctaccctctcctccctctcctcatcttgattcagtagctgtagggcacctggagaacaagcccctatgccatgttaccgctgccctaccaaccatagggctgggctgggttgtggtactgcaaggctaaagcccctggagctggagccaggcaatagtgaggatgaggtacagagctgaggacctctccatgggtctgacttgcagtgcacagctgcaataacaggtataaacctctgacccccgagggaaagctagacacaaagagtaaaactccactatagagcagacccaggagtcaaagtctttgatgaggtgggccttgaacttcacgggaaagcaggcagcaatgggatttttccagttctgagattctgtgtattcaggtttctagatcaaagactcatacctgttttttatttttttaaatgttgaatgattgtgtgtgtgagtgtgtgtgtgtgtgtgtgtgtgtgtgtgtgtgtgtatgtaagtgtggatacacacatgccatgatgctcatgtgtagttcagagaataacttttggaaaccaattctttcattccaccttgtgggcttcaggatttgaactctcgggttgtcaggcttgctcagcaagtgctttttctgagccatctcactggcccaagattcacaacataacagattagatattgatactttctgctcataccttatattctggatcacctgcatctaagacttaggaagagctggctagagcaggggagttggagtctcttagaggggagtaggtgctctcagtgggagctgctcttatattagacctgttactgctggcaagttgtcctgaatagcgcttagttaaatgatggttcacgggagtggagactgaagaagtgatatgggaaattacaacatagcaaatgtttaatcaccaccttagaaaacctctgaggcagtgagttctttgtggagatgacattgttacagaacatctccatagaataatggatgctgtttccccaaagcgctggaagctcccatcccatatcttggaagaaggcagtcagccgtctgacttctctgagcttcgaggtagactgttgggagtgaggagtaacattgtgcatgtagtcagctgcagtaaagcttaaaattccagctagcccgtataaaagacacacaattcaggtattttatttacaagccgtaagccaggattgggcaggtttggagctaatcttacttatttcccagccatattatcccttcttacttgctgttattcctggccacgtgctcatagtccatctcctctcatggcggcctcctccatttccatctcctttcttccctgtattcaactttattcaaattcccttcctcttagcgcccaagcgtaccctcaaggacattacacttcctccggggaggtctgagtggccaccgttctccttccggagcttcacattccaaggagacagactggctgctcagagtagcttgagaccctatctcatggtagctctcatgagcttagcttttctttttctgttgaataaaagcaaaacaactctgccccacccccaactctgggtccttacactgactcgaagaagataactttccttagggcaaaatgcttttttggcaacagaaaaagcattatctttcaaattgaaattataaatatacctcatgtggataaatatacctatgttggcaatttatctcacctggggaatttgtggatctctttggcaagaagagccccagtgctcgccagcaggtagggaggcccaaagatgtcaaatgaatcaggatgccaccaccgcccgaggcatagccagctcctgatagtttgtgaggactctgagggctgactgtgagcgaggaggcctcagtgctttctgagctggccttgttctgagcccgtttatgggtttctctacaatgtgtacctcctcctggacgctcgctaacctgatgggaaagctggcagattccgttgagggatcgtgactcattctgtctccctggagggaagtataagacaggtgaacagcatcatctttcaaaatgtacaaaatgtaactgacacagaggagcttgttctgaagcaaacccttccagagtcaagcctcctgccctgccccaagtggtggtgacacacagctgatgactgtcacagactacagaataaaagaagtcatataattgttgcatggccccaaagccttttacaagggaatgataacaggactgagcaggtagccctatgcccatgactttgaaacaaatgtgattttttaaaaaattagaaaatactcccatcatatttatcagtaagatttcagtagaataaaaatacatgtcgcattataagcctggttccctctacaaagaaaccaagctttgaaagctgtcctagcgatatagctttcttactgacatttgaaagtttcagatggtctgatctgggagaaaagggtggacaggaacacaagactagttggtaccactctgtgagaacatgagaggtataggtggctccaacatatgggaaatcaaatccttccagaacttaatgaactccaaacgcagctgcatagcctttacctgaaagaagctattttttttttttgtagaattacacttctgtcatatgagtgcatctcttacacgcatatctgagtattttgtaacattgtgtctaaggagctcactcttgggagagttatcctagcattgttatttctctgagtgcatctcatccatgaatatccagtgttttgaaacattgtgtctacagagctcactcttggaagagttagcattgtatttttgcttctctggcttggcattggggtggtatggctgaagccactagacaacagtccctgtcatggtcagacatggtgagagactaggaatgcctgaggaagacacgcatgacttgagaagcaggtcctagaccaccattggtgagcccttgggaagtttgcattgtgttgtaccccagaatcatctcactaaggacccagtctcagccacaggtacaaggtagtcctcttacggttcctctctagttccccactatcaggcagccctagcctgagctcctggtgatccactgtcctgcagcaaggctgaacgatcactgtcagtaggttgggtaccagctcagtgcagttgcagcttagttagcatgctgtcgtcttccaccaagtcaagggtgctagggatgtggaatgatggagtttgtgagacttatagccgagttctttgagaaagaccactccagtgtgtatattcacaccttgaaagctaataggcctcttctgggtctttgaccctgaacgcagcgaaagctgttaccatcttcaggtgtctcactgatccctcctgtgagagcttaaaaaattgtatggatgcctggaggacatctgggaaccttgagaaaaggggctcccaggtagccatcttcccttcagtcctcatcccttaattatttgtggatggcttattaagtgcaggaccctgtagcggggcaaagtgcagccccctccccttctcaacattctcattccagtggggaagagatcacgacacaggcaagtgctaagtggtagcatgtgggaagaacgggatgctaaggaagctaagagcacaaggacctgatgtttgggtgggaagagaatacaatgagcttccagattgaaagtgcagggcaaggcaaggcaaggcaagaagcagagtaaggttctatatgcactgggccctgatgaagtttagctaggtgacatattattctaggcatcccttcgtaacgtttggaatgtgtttgtgttgttacttaaaagttgaaaacagcttctggaacaaagtgcaatggaattctgatttttgtaatacttccaaatgactggcttcttcctgggcaatctagaacctgaagcatctgtcgcatcgtctgacatccctgcctccaaggactaaataaacccttgatgtgaacgagttgtgatctactaaatgagctacgcttgggggaggggcataaagaatccagagcttatctaaaacattctccttttccttcctcctcccaattcaggtgatcatggtaacgggggatcatcccatcacagccaaagctattgccaaaagtgtgggtatcatttcagaaggtaacgacacggcggaggacattgccgctcggctgaatatccctatcagtcaagtcaataacaagtgagtccccgaaagaactcagacctgacacttgcacctccgtcctcagtctgtcctcccaaaaatcactttgtgaagttcctggttggggggggggggtgtctcctgcagcaagaaggattgtggggtttacactctaccaagttaaatataacagaaaagtaactaggtaattaggtcactgggctttcagagggaacaggaaaagatagagagccaaaggcaggagtggctgacaaagagggtcaaggatgggacgagtcaatctgaggacagcacacactgggaacaaggagagtgggtaggaaagaaaccagaacttaagagatcagtagagactgctggaacctgaggtgaggcctcagcgctttgatcgagcctttggaaactccttcccttaggtctgttaaagccattgtagtgcacggctcagaactgaaagacatggaatcccagcagctggacgacatcctcaagtcctataaggagattgtctttgcccggacctctcctcagcagaaactcatcattgtggaggggtgtcagcgactggtaagggagctaaggggccctggggagcctgactgagtccagccacaaagccagcaggggaacacatggaatggataggaaggtactggagggaatcccatcttgaactccgttgatcgccttcagtttgaaagctctctgaaggcttaaatagctcacaggaacagaagacagggctgagcacagttaaacacgactgcaagatgctgaaatcgagttgacctttgggactgatcctgaatctaacacacattttttttttcactcttgtctggatttcaccagggagccattgtggcagtgactggtgatggggtgaacgactcccccgcactgaagaaggctgacatcggcattgccatgggcatcacaggctctgatgtctctaaacaggcggctgacatgatccttctcgacgacaactttgcctccattgtgacaggcgtggaggagggtgaggaggagggtacctgatggctggatttggtcctttgagtggggcttagagtacgttaccttcattacctatggttaccgtccaacctcccaatcctgtacggaccgcaagaaattagaagacaaagccttgaacattccatcagcttgggctgaaggaacatgatttgtcgactactcatccagcaggtgtaaagccctaggcttaggtcccaacaccacatagaatacttattaccccagcgctcagatgatggaggcaggaaggtcagtcatccttggctacacagcaattctgaggcctgcctgtgtaaaatgggagaccttatattaaagaaagaaagaaagaaagaaagagagagagagagagagagagagagagagaaagaaaaagattcagctaatacttaagtgttctttttaaagacgaagttggagcgttgttcagatttgccagggagactgagaccctggcatacatcatatcttctttatgggcttgctaggattcccatgtacttacttcaatacagttttcagagtgaggtagccactgcctcgaaaactgaatgcttcagtcttcagcagggccccagagaaacttgtttgtctgaatgattcggacctgctaagaccaatcggaaattatctgcaaagtaactgcatgaactcaatcaccctctgtccagagaattccaaagagaatgccgactggaacagagccccatgaggctccccataaggctgcatgcttcggtcccttatttctgtctgaagctatcttactaaaacataccaatccactttattgtattctggtatgaatctgacagtttgcacattattttaaatctacttaattcaataaatttttctgagcgccatttgcaagatgactatacccaggacaggagacaaagacacaaattcctgcccctgaacaactttctttgtagtggggagagacagacaatgaacaaggcagatttcacagaaagttaaagcaatagggagagagagagagagagagagagagagagagagagatagttaagggaagaaatgacagcctgtgggagagtagccaaggctagacccagccatcttgcaaggcataagtgtcactcagagtagccaaggccagactcagccaccttgcaaggcaggagaagcagcactcagagggataagcaaggtcacaagttaaagcagaaaaataagattcaaaccaaagctccggttctttccattccatcttcatcttgcaaagactttaacactggtattttcagccacctccaggattaactctgcccaactctgcccaaatttcagagatcaggtaacactagccatggtgaatccaagaacaaaacgtacgaagtctgcccatggctaataaaccatggcttgacttgacaggcacaccgtttgcagagaaatcacaggcccccacccccatctccccacctccacccccaccccacccccactcccaaggtctacgacttcccagcattttcatggatcacccctttctagcaactcctcttcccaggagtcagtttgtcagaggtgtgtgtcctctggctgtttctcctctccaggccgcctcatctttgacaacctgaagaagtccatcgcatacaccctgaccagcaacatccctgagatcacccccttcctgctgttcatcatcttaagcatacccttgcctctgggcaccataaccattctctgcatcgacctgggcactgacatggtgagcgccaggtttctctttggggattcctacgatctgatccatcgagtgtaggaaaaaaaccatcctgtgacaggacagctctagagtgtcttctgaaccccgcatacctgtcattcccaccatccatcctccaggtccctgctatctccctggcttatgaatcacctgaaagtgacatcatgaaaaggcttccacggaaccccaaaacggacaatcttgtgaacaaccgtcttattggcatggcctatgggcagattggtgagcctagggaagtgcaggggtgaaggggtgatggagggtgacagtggctgtggctggccatttagacacctctgtttagaagtcagggggaacagtgtttcaaaaaagaaacgacttggctctgggaccacagagaaccgttgatctctgagctgcccgtacagaccagcagtaaaggggaaacctacataaagtgacagtgccccttcccatatgtgaagcaaggagtaaagagataacacgctacagtagctctgaagtccttctgacagctgtaggctctgtgcttatacacatacctcacacagacacatgattaaagttaaaaatgtttctaaaaagagtctatgatccaaagatgaccctggatggaccaaagcaagaccaaaatccagtgaggccaactctaaatcctatagctctatgattcgtgccagagggcttaaatagctctgctctgcaagcttaacatggttagaaacaaatgtcaggattttggaagcaagtctcagagatggcaagatcaggtcaccgatgacaaaaatcttcgtcactatgcaaagacacgctaaccagctatgatctgccttttgggaccattctctgaacagactctcctccctgacgactctgtctctcacagggatgatacaggctctggctggatttttcacctattttgtgatcctggcggagaatggttttaagcctcttgatcttctgggtatccgtctatactgggatgatacacaattaaatgacctagaggacagctatgggcagcagtgggtaagtgaaaaggggaggatctggttcggaactagtcagactgagggagtcacccaagtgtggtagtataatcccagcacttgggaagctatggtaggagtaccacaaatggaaggctcatctaggcaacatagtaaattcaaggttagcctaggctatatgctatgagactttgtctcaaaaaaatgtgtgttcaaatcttaggtgttgaaaaaagatactttttatatacactgtggcttcagccagttgaccaccatgaggcagtcagaagtccatgcttccatgctccaggagtcagcgatgcctagagttcttaccactcacagtaccaacacctccccaaagctcaactcaagctcttgttagttttacattctacatgtcttccccacagtcaaggtgtggcatgattctgatttatagtacaagaaatctatttaaaaataattttaagccaggccatggtggcgcacgcctttaatcccagcacttgggaggcagaggcaggcaggtttctgagtttcgaagacagcctggtctagaaagtgagttccaggacagccacagctgtacagagaaaccctgtctcgaaaaaccaataaataaataaataaataaataaataaattaattaattaattaattatacacaacaagaacttctcttagatactgaagacatataaagaattataagaatgggttgacaacagttgtttggcatctccaccatgttggggtcctgtgcaagtcgggcttcactttcatagcttcatacaatggcctctcagggcttttctgcatggactaccttgtcacatacctggcctcaggggctctctatatccacagaacattccacacacctttttctttccttcatggccttaaagccaacatcatgtgaatgacaacttgggacaaatcctgtcccccttgaatgccatttgcagcagcttctgtgactgctttttagaagcaggaaattccctaggccttttccttctgcagggtggatgcttggcttccttgcaaggtctcaccctgagggcacccctgcctctgtccggatgtaggtcaggtctctcctcaatctccttatgcctctcagctcaagccttggaggccaacattaaacttcctggtgattccttttctcctcaagccgtacattttctatttctctttttttcccacttgctctttttcattgttgacttacataagagtaattactaataattactaataaagtcaatattaggctatctcgaaatctcccctgcctaaggaattgttctgttacttttaaattcagttcttaggatgagggcagaaaacagccaccatctttgccaaaatatcacaggaacggactgtggtccaatggccttcttctctcagtccccttgacctgggcatccatgatccacataggttttgacccactactgtcttccaaacttctgctcaattggcccagtaagctctgcttgcagcattcagtcacattcctagtccaaagtgccaaagttttctttccttttgccttcacgaaaaccacatggtcaggtctaacacagcaatatcaacttctgtttcagtcatattatttctcttctttttcttttcttttttttcttgtatgtttattttatgtgtggttttgcttgtgtggcccacagaggtcagaagaggtcattggacctcctggaacggagttaagcatggctgtgaactgccacatgggttctgggaactgaactgcaagagcaacaactgctcctaaccactgagtcatctcttcagcccctcagtcatttttccattgatgtgataaaacaccatgaccaagaaaacttaaaataaaaaaaaaaaaagaaaagtttattctaggcttacagttctagagggttagagttcatgatggcagagctgtgagcttccccacccagaaagtgtactacttacagttttaaagtaatagttccttatcttaaaaaaaaaaaactttcattaatcctacttatcacaacctatattagaaactgacccaagaccttgggatatgacaggaaaccaaaatgatcaagtcatgagctccttcccatgtagaccaaggatggcctctaagtcgatacctacctcttgcttctgcctctcaagggctgggattaaaggtgtggtccaccacactcagcctataaaacatgggtcttatggagcttactctagttatgggagaaaagaggggtgtgtgtgtgtgtgtgtgtgtgtgtgtaacacatcaggttaacagattttaagtaagtccaagggagacctgaaaatattgaaattgagatactggagtgagatagaaggataaacatggaagacaaatatgcctgaaatttaaattgcagaaaatctctaggtattggaaagggtataggataatatctaatgcttggctgtgcaggcaagctgcctacgtagagttgtggaggagaacagaattagggggggataaaaaaactgggaagccatggcaatggaagattattcataaatatgaaatgtagatctcaaagagagagagagagagagagaggccaagagaagaagtaaagaaacagtgagccagacactaaagtctctaagcaatggcagggattggcacagatggtggtgcagagctggcgggcacacaaatatgctggctagccttggccttggttccatgtttgactcaacaagttttcccgtctgttttgtttgcttgtttgtctgagacaatgttttactaggcagagcagactagttttgaatgtagaggtccacctgcctctgcctcccagatgctgggatttcagttgcacaccaccttaaccttagttttctaatcattgaaggctttttctatccaaatacaacttgtgatacatcccaagtggttttacagttagtagcttaatagtgtgcaaacctacctactaatttcttattgcctatatttagaaacatgttgttttgttttagatgtggggtctttcctccagtttttcccccagggtaatttggatgcacctcctctgtgttcctacagcattcttggctcctctgctgtaacttatctattgcattggcattgttagcatagttatgcctcctaccagattctaagtcccttacacatacaatataaaggagagaaccaagagatgaatgagggagttctcctgggccttgaacgagctaggcaagcactctgcaactgagccgcagcctagggcttctgtctaccattcttctcagacatttctcccccccactttattcatattgccctctggttctcccttcctttctgacttaagacctctggactctgctggcctaagtccaccttcttttaatcatagtcctaatttattaagaacttactgaggtgtgctacataattcttaataggcaaagtatggtgaagggatccagagaactttgagtcaggtagggaaaatacacaaacactataagaaagacagctatgtgcacagagctagaggcatccagagaatgcaaggctcagactctgggtcctgaaagacaaaaaagacaaggaactcttggatgtatatctaaacttcttactgacccagatgccacttttttctcatcctacccccagacctatgagcagcggaaggtggtggaattcacatgccaaacggccttcttcatcagtatcgtgattgtgcagtgggctgacctcatcatctgcaagacacgcagaaattcactcttcaagcagggcatgaagtgtgtgtccacgtattgctaccaaatccctccctgccccctccccccacgcttgaacatgccctttactcgacttctcttcctgtctattgcacttatcactctgtcttcccagaaacaaaatcctaatatttggactccttgaggagacagtcctggcagctttcctgtcctacgttccaggcatggatgtgtccctgcggatgtacccactcaagtgagtaaagcgaaggggtcccagcccagattagtggagctaccctcagggacttgcgaggtcctttcacactcaaatacacggcctttatttatggcggtatcggagactatgtcaggagatcacaagctgctggacttgcatattcagcagacttagcagtgtttaattgagtggaattttatgacggcatctgaccaagctgggcaaggatacatgagtctcggtcctaatataatcatggcaatagtctaatttaccaggtagagtggcacatacctataatcctaggagacagaaacagaggcatcaggaattcaagggtattcttggtgacattgtacatttgaaggccaatctgagatagaaaccctgtctcaaaacaaagagccaaatttatagctagcttaactaattcttttgcatatatatatgcatgtatgtatgttttaatgtgaacatacgcacctgattattattccagaatccctctttctctctctgccaaactcctacctcctatttcctgcctcagctcatgggccaaaggcttttttttattgacaggtgagtgcttttacacagtacacaggagattctctctgcacatatgtgaggctctggggttgtgctccagcactggaaaaatttggaatctggcagtgttgaggattacagagaacttggttttaagcactgggcatatctgtctatggagaatcttttactgatagcatctatgctttcgtcgctgaagatgtcaataacaaatggaaatgagacgactgcactctgtaggcatcttggacacagcacttgtacctagtattattattctgtgtgcccattcagctcttctttctgatctctctgaactcttcaagataaaagagcagcatataaccatttttatttcccctgtatcttacacagatccagggtacacatataactgttgttcaatgaatggaaaagtatttgtatgttactggtgtgtatagtacattatatttgtggtgtgtgtagcaaatgaaccctggcctatgtctgtactgtccaatatggttgccgctctcgatgtgtgacaactgagctcttgattagtatgactaaagagcatgaaatgcatatttataattttaattttaactcagagttaaaaaataaagcaacaaccaggtagtggtggtgcacacttttaatcccagcactcaggaggcagaggcaggtggatctctgagtctgaggccatcctgttctacagaccctattttttaaaaaaatattttttaaaagaaatgaaaggaaagaaaggataagataattttactcttttagagatggtatttccttttagccatttgaaaatcacattataaaatgtggtgggatgcatgcctaggatcccagcacttgagagatggagccagaaagatcaggagcgtctagccctgcctgacatcacagcaagttcagggccagtctggatgctgagagcctgcagagatgggtggggaaacacttggtgactgagttaagacaggtaagcagaacaggacgccaccagatttccaaggtttagtattaaaagaagaattcaagctatctgagtagtcatgtttatgttggttagcattgggggtatatacctatatcacagcactgaaaggctgaggcaggaggatctcaggtttgagggcagattggcccatctggaaagactgtgctttaaaaccaaacagaacaaaatagtgcttatagtgattacacacatgttgaagtagtactttgatatattagttaagtacatttatatttttataattgatatattgatttaaataataaatatatatttaattatattgatatattagattaaattattaaaatttatttctcatgttccacttatcttaatatgggcattagagaacttagattttacatgtggtttgcattatatttttctctttttccatttttttctatgtgtgtgcatgtcggtgtgtgcatatgatgtgtgttcccatagaagggcaggtgcacatgtgttacagcacacatgagaaggtcagaggacaagggctggccttagcctttaccttccagcttgtttgagccaaaagtctcccttgttcacagctgtgtgtactaggctaactggtctacctgacactgtatcttctcctgcccctgcctcccatcccccgttgggggattacagaggcttgtgctagtgcgtctagcttttacacgaattctagggacccaaaaacaggtgatcaggcttgtgcagcaagcacctaacccactgaaccattatctccagccatctcccagcccttgcattgtatttccattgaactactgaacagtgctattgatttataccctgctctctatgacactcaagggtataaaactcgttaaatccatcttcctgtcccctcattatagaagaggcacaaagaggaaaaattcagtgtctattttgccatatggaagtacatgtaaacacacgtgagtaaatgtatcaattgccttcttcagcagtaagacttagagtatgcagagaaaagcaacaggaggaagagggggctctcagcaactcagtgtcagctggcaataaactacattaattctgcacatgacatttatcaaatggccactggcattgtagatatctgtcttgtgactttcctctctgcccccagtcgcttagcactagggctctgacctcctcaaacggaaaatcaactgtatctcagtttgcctccccatcttcaccacccagctcagtctccatggttcctccgcaccgttgctgctcacccttctctggctcgtgcctcttgagccacactgaccgactcttgctctctgcaggataaactggtggttctgcgcacttccctacagtgttctcatcttcgtctatgatgaaatcagaaaacttatcatccggagacggcctggtggtaaggctacctaccctggatcctgccctcgagtggtcgctggccctctcatgagctttcccatcccatcggctccctccacagccactgactttctctacctcactgtctgtcctttgctcttcccggaccctggtcctctactcctgacctcacgtgttcctcccagtgcttggggccctgctgcacatgacagcctctccacttgcttcttgtctgcatagctcttctgctgtccttctctctgctcacttggtctcttttccacaggatggctggagaaggagacgtactactaactgcctcagagaaagatcttcacacgacattggtctcacgagagccaggactgagtataacaatgacacctgagatagagctgagcaggggcccctgttgtatgggttgaattgactctggatgagagagacacattcctggggctggagaaagagtctctggtaggagatggaataggttgggagaaagaaagcccagcctgttctgcctggggtccagcgagtatgtgcagtcttgttacatccagcagcctgtctagagataaatgcttggaacaaccctcaggttacttggtgtgcagaagtctgttttggagggaacagagttcagcgaagctcccttcctacacatacattgtaattagtcaaagggacctcagggacctcagaagagactaaaaatgtactagaatccagcatctggggctaggtgtgggggcccacagtcttaatatgccagcatttggaagacagggacaggtgaatcgctgtgaatttgaggctagcctgtctacctggtgagttccaagccaggcagggctacattgtgagaccctggctttaaaaacagaaaatcaggcatatttaaccctgaagggtatttcctattttaagatcgatctgtgatgtcctgtcagtgtaagggacaaatagctgccctcaaagtctagctagaaacagatactgcaagggagaaaagagcagctgagctacatattgttaggggtaccacggcactcatatctgtacccatgcttggggcttgtggggctaaataatctagatcctgacttgcattttctcagaccagactacaggccatagcattgttctaaaggatacctaatagcatcaggtctagcaaagctcactgactggggaatggcagggtggggtagggtggtagggttccctcctcttcatgtatatggggcagactgtgattcctgccctttaaccctgtcattgacatctctacgctagctatcccatcctttagccttttctctctggtacagcctcaaagcaggttacacgcaaatactaggcaaataatgtatcactgagctacatcctgagcctgggacccaagctctttattggtctggtcttagtaaaaaagaacaagaagccacccccccaccccacccctgcccaccttcctctctagattcttcttcccttgtcttgccccctctccaactcatttctgctcattgagcctctctgctttgcctgtgactctcgttcacttcaggaactttttagagatatccggccaaatgatacagaggaatgctgaggaaaaccaggggaaaccggggaaaaccagcagctgttaccaaaatgccacctccccgcccccacccttctcccccccccccgggggggggggcaactgcacactttctggctttgggccaaggaccaaacccaccatcagttcttaggaccatattccctccattgcacagtagttcctagaggaaaccaggggcccccatcccagaatgtgtatccttaaccacttttcaaacttgtcttatagtggtaactcggacccaacacagttacaaacaaggctaaataaaataataaataagtgggatactggtagaggactgtggctggcagacacaacaaacaaagaggaaacaaaacaagaaaccctcccactggaaggtgtagccagcccctctttctctatgtcaggcccctttctcagagctttccttccactccccccgcttctagtgcaaggtctcctggggacagagctagatcagtgtggggtccacctcggctgctgacagggctgaaacagaccctggaagatggaagcaggggtggggaggtgtgtgagtgagatggggagggggagggggagggaccagctcctcaagtttcagtagtgaggagctttgagtgtctggtgggttaaaaatacagacgccccaactcagggtcatttgatacggggagctgaggcgtgttagatccagaggcctgcactcaggcagcctggaaggaagggggctgaggagaaagaagaaaggaaagcatgagagaggaggcctagagtagtagtgtgggagctgaagagagtaagggtggaagtggggccgtaaagggccagaagaacggagtggtggctgcacagacaaggaggcgctgaagcagtcagggtcaccacagagtcctgtctggctcctaaggttcagttcacagtggaagaggtctggtgtgccagtgtccgttcagatagctccctctccccagaaccctgaagaaatgagacaccatggctggatcatctactgagcaggcctgcccgtcactcctgggtggcctctgcagccacgggtgtaagctctgcctggcacatcagtcactctcctgggagatgaagagacaggattctgagatctcctcagctccagtgccatgcttgggctacctctggcctctcccgctacagtgtcagctgtccctcttggatccactcctgacatgttcttaagaatgctaaattagctatataaggtctgccccatgggaatgcaagatgctattctgctagcataactttatacttcttcctagatgcgaattaaacgccatccttctagaatgagaagtacgttgcactgtggacatggaagtctgactttattgtgatctcccccttgagccctcttgagcctcagtttacctaaatatagtatgagccctagaaggccatgcaggagtccttgctaagtactcaaagcttaattcaactcttcacctctaagctaggaccctaaaaatgacagccttcgtacctccagctcagctgtgtgcctcagatgcacagaattaatccacagcgtccgataagggcacagggtccacctcttcctgtttacctcgagttaactttttcccatacttataccggatcatctgtccttgtcaaagacataggaatgaatagtagctattagctctctatagacctgtgcagtctgaggaatcctcccagccccttatgccctagaatcagagtcccacgggatcaggccagagccctcagaggaggaagcgccacgaagcagtgggcagtacaggcagagaaagcccaagtcgccatcactacaggatggaactcgggccagccctgtccttccccctgcattcctgagttgggactgttgagtgaagcaaaggaaactgactggagctaagccaggattctggtcttggactccgctccatcttttattcagagaatgatctcatccttggtccacggtctttaaagggaactgcacgggggtttctttcctggagcctggaatgcgcttttattgctcacgtctcgtccataagatcaaagaaataggctttacctatagaagactgctggattttaggagttagaaataccacattctctcctgtattatcagtttagcctctggcccagaaggtgtcgtccttgctacctgtacttctttctgataggccttgtcctactctgggatccctggataccctacatcccccctcctccagccccagcctcacttacccctaactcatctggtcttatttttagatccggcatctctctctctccctttcttaatatggcgatgagctcttaggcctgcatggggccaggggctaaggagtcctggacactgggggagggggaaggaaccagctgctgggagggagcctagggaagaggtataggaggtgagaggattcaggctctcatggagctgtcctggcctcagaaggttatccatccctcctgccaaccacagagacatatttagacaggaccaggtggggacggagggggtgccagtttcaaggggcagctccggttccctccccgcccctgctcctattcctcctcctgaccctttttctcttggctctgtcggcagtttctccaggacccagcagtgtcctctgtccactgctctggcccactctctaccccacccccacctggagcccctaactcaggattctgtatccaaggggcacctctccctatttcagctaacctcctctggaccaggagagcaggcccagattgtactacctccatgagagctaccgacaggatgggggccagagcagtgtccgagctgcggctggcactgctgtttgtactggtgctagggacgcccaggttaggggtccagggggaagatgggttggacttccctgagtacgacggtgtggaccgtgtgatcaatgtgaacgccaagaactacaagaacgtgtttaagaagtatgaggtgctggccctcctctaccatgagccccccgaggacgacaaggcctcgcagagacaatttgagatggaggagctaatcctggaggtgagtggaggatagcaggcctggagagcatgctcagtcccctcggtgagccctgagtctgagggtgggggctagcttaagagcagcatggctgctgggcctctgtctccaccaagtacatgactggaatgtggccttggcaaaaagaaaaagactcagggaccaaggtcctacccttctgttggtaagttgtgctgcaggaggcaggggcactaggtttggctggggggggggagaagctgggtggggggagcttgcacagtaccctgcactgtgcttcatactactcttgtggccaaaagatccccctctctttacacacgtagggccgtgctccaggacgcaaacagcagaaccgtgaacacgattgttcttttatttgccttcaactgacttagtgactgtacagttaaatgacttctagaggcttcccacagacctccccaggccaacccgccgcgttttgtcccctaggggaagtccttactagaaaactctcacgaaggcttcagcatgccttccccatcatttcagccagagaatctactttaggtccaaggcagagacggttaatacaaaaaagaaatgaggggaggcagccttccgattggattacgtggccacacgcatccctaatggagctaggatacgtttgcctttgtctgcacttccccggcttggtgatacagagaggctccaccttgtccgagcttggaatgtttcagtgtaagacacccggccccctggcttgcatttccgtgtgccccatcgggctctgcaaaccgctatctgattaatgagccaagtatttttatcctccgtgttcagtggcctctgccatccacctgccacccgccctcccattctcctaaggatcactgcagtgctgggtgggatacagctgcacacagtatgcccacagcagaaagaatccgcaggtggctggctggggaggcttgtggggcgaccagcctaaagaagaaggaggtggggcctggaagaagagtgactgtccctccagggatgatggcgacctcttgacctctggcctttcctacccctcaccccacaccccatcctccacagctctcactttgggagttacttcaggatcccagggtcccacattcccctctgctgagtttggcctttgatcaggatgaaaggtagggcccagtctttcatggaaggtgagactcagcgtccctcaggaacgttgcagtgagcaataaatacacaccatcttttcaaaggctgaaccaaagacaggctagggttatgaggtgcccaggcagagtctgcttctaacagatggtgaaggtcaatgtttggctttcttgcacctcagatgacccgatgaatgataggaacgtatctcacaaggaagaggttgataagaattctgggggctaatttaattctgactccttcttccagttagcagcccaagtcttagaagacaagggtgttggctttggcctggtggactcagagaaggatgcagctgtggccaagaaactaggtaagggagggcaaggaagcaggttatggaagactggagaggcccaggtgggggtttgggggagatttgagagctgcacatctatttagagtgggccggggcatttgagattaggggctattctgtatagagtcctgcgccccactccctggatgaggtggaacggtggggtggtaacctttctgctcatctagaaaataagactgggtagggacatgggcatggtggctcatacttgtgatacttgtatttgagaggatgaggcaggaggattgtggattcaaagcttcctgggctacatagtgaaattctaaaacaaaacaaaacaaaagcatgtatgctaacctaaaaaaaaaaatgtagttaaaaaaaaaaaaaaaaaaaagaacacagctaggtgttggaaaggaaggtgaaaccaagaaatacaggcatagccagagagcccttctgcaaagtgcttttttggctcctcccctcccccctcccttctcccttccccctcggcttcctccctttctcttagcagagcccagatattacaccacccggccaccaggcggcagcacaggctggacaccggatgtggatgggggaagggtagttagcaacaagtcatctggacagcaatagcaaagagtcagccactagatacttcagagtcgctggcaggaatatttgtccctggctgtgtaggcagagcaagggagctgtgttgctagaatctgaatcttcccagtttcctcccctcaaaccctaccgatccccacccgggcaggccccagcttctgcctagctttagctcctgaactaatttgggaatgaagggtttaagggtttgttgaaggtagatggggcggggcaggagtagggggaagggatggagaggtggaggatgagtctgcagggattaacaagtgggctgtgaccaggttagactcgggtttctgggaaggttgtcttcctcactcaccttcccaccatgcgtttcctaggactaactgaagaagacagcgtttatgtgttcaaaggagatgaagtcattgaatatgacggcgagttttctgcagacactctggtggagtttctgcttgatgtgagggttcccctgagcctcatagccttgaagtttccaatgcccctcggtccttactaatcaaccctacactcctaaacacacacacacacacacacacacacacacacacacacacacacacactcacacaccaggcatacatacactataccagtttcccacataccacgtgcaacatgtaacagatatcacatacatatatcatatagatcagacacaatgtacacaaaacatatgcatatcacatatataggcccctatatatatgtgtgtgtgtgtgtgtatatacacatatatatacatatatatatgtgtgtgtgtgtgtataaagcacatcatatatatgtgccacatataccagatataaaacatacatacaatgcattctcatgcacacacatgacatacagcatacatatagcaataaaacatgtaatatacaatttatattatatatatatgtgtgtatatatatgtgtgtgtatatatatatatatatatatataccatacacatcagaaccacaaataaatcacacatacaacacatatcacaaacatataccccatgccaagcagaagatacagaacatgcgtatcacacacactgcacaacactcagactacacacatacaccattaacaggccacatatccaccctatacaagcatctcctattctagttccctgtctttcccctgtatctttctctggggcctgtcagggacaaaaggaatggtggtctcaatattctttttctcccaggtcctagaagaccctgtagagttgattgaaggtgaacgagagctgcaggcatttgagaatattgaagatgaaatcaaactcattggctacttcaagagcaaagactcagagcgtgggtaacagctctttctgacccacctatcctccttgcctccctactttggccagtggccaagcatctctggttctgacctcctaggcccccttcttccttctgcacggtcagctccatcatctgtccctgcactctggggcattcccaaacacccccagcattccgctgcttcctctacaattctattgtattttattctcagagagctagagttagagagctaaaggggatgggtctcttcctgggacccacatgtcaaggaagacctgcagagaagattccccttggtggtgggggggagtgattctttggcagaccctgaacatgactgtgactgtcccttcctccccctcagattacaaagcctacgaggacgcagctgaagagttccatccctacatccctttcttcgctaccttcgacagcaaggttctcttccctgtggctacactggctctccctacactcttaagcttccctcagcctaccctaccaaaattgatgggatcttggcaccatttttcatgctggtattccccaccccagactcatgttccttctcctatagaattgaagggaaggtggacattagactgtctaacccacctttattgtgttaaacgatgcccagaggagtgaagacacttacccagtgacccagagccacattttctgactccttttctgcaactagttcctttacactgtttctcactcagctcccgcttctcctgctccataactcttgtctacttcctcaaaggtggcaaagaagctgactctgaagttgaatgagattgatttctacgaggccttcatggaagagcctatgaccatcccagacaagcccaacagtgaagaggagattgtcagcttcgtggaggagcacaggaggtggggattggccaaggttcctcccagggctagcacatcagtttgtgaagtgggctgggaagcaagccaacctggaagctacactgccctggagatgaatatgcttgcagacgttggtgttcactgatataccagtaggttctgtgttgtatttcataccccagcactaagctctgagccctacacagagaaagtcctctgtaaatgtgtgtggactgaggggctgcttagggagtgtcagccaatgagtagagtacctgtgttcggaccaggaactgggaggtaccttctctctattactgaagttaatttctttagcatcctcagtgaaagtggctccagggggaagaatcagaactgggattcaagcttgaactcagtcccttctcctttgtcattcttgacacttagcagttgtcaatggaggcacagggagcggcctgcggggcaagggtttttgccttccagtggctgttaggcaaggtttccaggacatttttggctgtgaggagtgctgctggtattcagtaattagaggccagagatattattaaccatcctccagtgcgcacgacgccccctccctcgatgtctgcagtgctgatgcgaagaaaccctgccctatactcacacaagtctcttccttcatgtgactccacaactagaaatacccactcatcagtctaaatactacttactctcgcccactagattttggcctctttcactggggcacaacataccaacatggtttaaccaatacctaactcagtcctcataacctatacccgcccccaaccctttcctgtactgggaagggaacccagggcctggcatacaggaggcatggaattttatttcgagcccaggctgtcagctttactaaatgagtgaatgaaaaagtaaatgactctgctgatatccagttcttacctttgcccccagcgtctctcttccagccatccccttcccactaaccattgttttgcagccgtgccatgttctgggcctgatgcccagagcttagatttgctaactggctttgttctgggctacaagctgtttatgccctaggcctgacccagaggtggcttcagctgtggggaccttctggagggaggtgtccccacccactgaatagggaccctctgtctctcctagatcaaccctgaggaaactgaagcctgagagtatgtacgagacttgggtgagtgatgaccaggaccaggcccttggggagcaggagtgggtaaagacccggatcttagaaacggctgtccctgctcctccctgtgcccttagctaggaagaaagccgtgtctcagccaaggggcacgtgggttggtttttatttgttttgtttctgtaccgaagaccatgtcaggtctcaagtgacaggcatgacaatgaacatgacaaggctgactcaaactctggagctgacaggatccctagagcagaaaggatgccattagaaaagtcaccaccgtgaaaacata

SEQ ID NO: 849 - DNA, 6542 bp, Mus musculus
tgtctctgtctgtctgccagggtctccagctgccccagacaggcggtgtggtcttgggatcctcctggtgacctttccagcctaggtcccctcagccactctgccccaagatgggtcgtggggcagggcgtgagtactcgcctgctgccaccactgcggaaaatgggggtggcaagaagaaacagaaagagaaggagctcgatgagctgaagaaggaggttgccatggatgaccacaagctgtccttggatgagctgggccgaaaataccaagtggatctgtctaagggcctcaccaatcagcgagctcaggacattctggctagagatggacccaacgcccttactccgccccccacaactcctgagtgggtcaagttctgtcgtcagctttttgggggcttctctatcctgctgtggattggggcactcctctgcttcttagcctatggtatcctggccgctatggaggacgaaccatccaacgataatttatatctaggtatcgtgctagcggctgtagttatcgtcaccggctgcttctcctactaccaggaagccaagagctccaagatcatggactccttcaagaacatggtgcctcagcaagctctggtcatccgagaaggagaaaagatgcagatcaatgcagaggaggtggtggtgggagacctggtggaggtgaagggtggagaccgtgtccctgctgacctccggatcatctcttcccacggttgcaaggtggataactcatccctaacaggggagtcggagccccagacccgttctcctgagttcacccacgagaaccccttggagacgcgcaatatctgtttcttctctaccaactgcgtggaaggcactgccaggggcattgtgattgccacaggtgaccggacagtgatgggccgcatagccactcttgcctctggcctagaggtgggacagacacccatagccatggagatcgagcatttcatccagctgatcacaggggtggctgtgttcctgggggtctccttcttcgttctgtccctcatcctgggctacagctggctggaggcagtcatcttcctcatcggcatcatcgtagccaatgtgcccgaagggttgttggccaccgtgactgtgtgcctgacgctgacagccaagcgcatggctcgcaaaaactgcctggtgaagaacctggaggccgtggagacgctgggctccacgtccaccatctgctcagacaagacgggcaccctcacccagaaccgcatgacagtggctcacatgtggtttgacaaccagatccatgaggctgacaccacagaggaccagtctggggccacttttgacaaacggtcccccacatggacagccctgtctcggatcgctggtctctgcaatcgtgctgtcttcaaggctggacaagagaacatctccgtgtctaagcgggacacagctggagatgcttctgagtcagctctgctcaagtgcattgagctgtcctgtggctcagtgaggaagatgagggacaggaaccctaaggtggcagaaatccccttcaactccaccaacaaatatcagctctccatccacgagagggaagacagtccccagagccatgtgctggtgatgaaaggcgccccagagcgcatcctggaccgatgctccaccatcctggtacagggcaaggagatccctcttgacaaggagatgcaagatgcttttcaaaacgcctacatggagctgggaggacttggggaacgagtgctgggcttctgtcagctgaacctgccttctggaaagtttcctcggggcttcaaatttgatacagatgagctgaactttcccacagagaagctctgttttgtggggctcatgtctatgattgatccccccagagcagccgtgccggatgccgtgggcaagtgccgaagcgcgggcatcaaggtgatcatggtgaccggggatcaccccatcacagctaaggccattgccaaaggtgtgggcattatatcagagggtaacgagactgtggaagacattgcagccaggctcaacattcctgtgagtcaagtcaatcccagagaagccaaggcgtgtgtagtgcacggctcagacctgaaggacatgacgtcagagcagctggatgagatcctcagggaccacacggagattgtctttgcccggacctcccctcagcagaagcttatcattgtggaagggtgtcagaggcagggagccattgtggcagtgactggtgacggggtgaacgactcccccgcgctgaagaaggctgacattggcattgccatgggcatctccggctccgatgtctctaagcaggcggctgacatgatccttctcgacgacaactttgcctccattgtgacaggcgtggaggagggccgtctgatctttgacaacttgaagaagtccatcgcgtacaccctgaccagcaacatccctgagatcacccccttcctgctgttcatcattgccaacatcccccttccactgggcactgtgaccatcctctgcatcgacctggggacagatatggttcctgctatctcattagcatacgaagcagctgagagtgacatcatgaagaggcagccacgaaactcccagacagacaagctggtgaacgagaggcttatcagcatggcttacggacagattggcatgatccaggctctgggtggcttcttcacctactttgtgatactggcagagaatgggtttctaccatcgcggctgctagggatccgcctggactgggatgatcggactaccaacgacctggaggacagctatggacaagagtggacctacgagcagcggaaggtggtggagttcacatgccacacggccttcttcgccagcatcgtggttgtgcagtgggctgacctcatcatctgcaagacccgtcgcaactcagtgttccagcagggcatgaagaacaagatcctgatttttgggctgctagaagagacggctttggctgcctttctgtcttactgcccgggcatgggggttgccctccggatgtacccactcaaggtcacgtggtggttctgtgcctttccctacagtctcctcatcttcatctatgatgaagttcggaagctcatcctacggcggtaccctggggctatacctagagatcatattatggagcctggaaaagaaaaggaggtagaggcccctggtgagctgaatcagaaaccaagacccagcaccaggtcctcaactacaaatagacagccgaaaatgaaaagaaggaagaaagatttagaagagctgaagaaggaagtggttatggatgatcacaagctaacgttggatgagctgagcgccaagtactctgtggacttgaccaagggtcttagtgtcctagaagcccaggatattctgtttcaaaatggaccgaatgtactaactcctcctccaaccactccagagtgggtcaaattctgtagacaactgtttggtggcttctccctcctactgtggactggtgcctgtctctgcttcctggcctatggcatacatgtaaattattacaaagaaaacgccaacaaagataatctgtacctggggattgtactatctgccgtggtcatcattaccggctgcttctcatattaccaggaggccaagagctccaagatcatggagtcttttaagaacatggtgcctcagcaagctctggtgattcgagatggagagaaaatgcaaatcaatgtaagagatgtggttttgggagacctagtagaggtgaagggaggagaccaaatccctgctgatatcagggttatctcggcgcaaggatgcaaggtagacaattcctccttgactggggagtcagaaccacagtctcgctgccctgattgcactcatgagaaccctctggagacacggaatatcatcttcttctccactaactgtgtagaaggaacagctcggggtattgtgattgctacaggagactacacagtaatgggccggattgcttccctgacatcaggcttgcaaatgggcaagaccccgattgccaccgaaatcgaacacttcatccatttgatcacagctgtcgcggtcttcctcggtgtttcatttttttggctctcgattatcttgggttacacctggctggatgctgtcattttccttattggtatcattgtggccaatgtgccggaagggctgctggccactgtcactgtgtgcctgacgctgaccgccaagcgcatggctcgcaagaactgcctggtgaagaacctggaggccgtggagacgctgggctccacgtccaccatctgctcagacaagacgggcaccctcacccagaaccgcatgacagtggcgcatttgtggtttgataagactgtgtatgaggccgacaccagtgaggagcaaaccacggggaaaacgtttcccaagtcctcagacacctggttttacctggctcgaatcgctggcctctgtaaccgggccgactttaaaccccatcaggagtctgttcccatagctaagcgggcaacaacaggggatgcttccgagtcagctctcctcaaattcattgagcagtcttacaaccccgtgagcgaaatgaggcagaaaaaccccaaggtggcggagattccctttaactccaccaacaagtatcagatgtccatccaccttctggaagataattccgaagcccacgtgctgctaatgaaaggcgccccagagaggatctttgatttttgctccagtttcctgctgaatgggcaggagtaccctatggatgaggaaatgaagacggacttccagaatgcctacatagaactgggaggtctgggcgaacgcgtgctggggttctgcttcttgaacttgcctagcaatttctctaaggggttccagtttaataccgatgagttaaattttcccatggaaaatctgtgtttcgcgggcctcatctccatgattgatcctcctcggacggccgtgcctgacgctgtgagcaagtgtcgaagcgcggggatcaaggtgatcatggtaacgggggatcatcccatcacagccaaagctattgccaaaagtgtgggtatcatttcagaaggtaacgacacggcggaggacattgccgctcggctgaatatccctatcagtcaagtcaataacaagtctgttaaagccattgtagtgcacggctcagaactgaaagacatggaatcccagcagctggacgacatcctcaagtcctataaggagattgtctttgcccggacctctcctcagcagaaactcatcattgtggaggggtgtcagcgactgggagccattgtggcagtgactggtgatggggtgaacgactcccccgcactgaagaaggctgacatcggcattgccatgggcatcacaggctctgatgtctctaaacaggcggctgacatgatccttctcgacgacaactttgcctccattgtgacaggcgtggaggagggccgcctcatctttgacaacctgaagaagtccatcgcatacaccctgaccagcaacatccctgagatcacccccttcctgctgttcatcatcttaagcatacccttgcctctgggcaccataaccattctctgcatcgacctgggcactgacatggtccctgctatctccctggcttatgaatcacctgaaagtgacatcatgaaaaggcttccacggaaccccaaaacggacaatcttgtgaacaaccgtcttattggcatggcctatgggcagattgggatgatacaggctctggctggatttttcacctattttgtgatcctggcggagaatggttttaagcctcttgatcttctgggtatccgtctatactgggatgatacacaattaaatgacctagaggacagctatgggcagcagtggacctatgagcagcggaaggtggtggaattcacatgccaaacggccttcttcatcagtatcgtgattgtgcagtgggctgacctcatcatctgcaagacacgcagaaattcactcttcaagcagggcatgaaaaacaaaatcctaatatttggactccttgaggagacagtcctggcagctttcctgtcctacgttccaggcatggatgtgtccctgcggatgtacccactcaagataaactggtggttctgcgcacttccctacagtgttctcatcttcgtctatgatgaaatcagaaaacttatcatccggagacggcctggtggatggctggagaaggagacgtactactaactgcctcagagaaagatcttcacacgacattggtctcacgagagccaggactgagtataacaatgacacctgagatagagctgagcaggggcccctgttgtatgggttgaattgactctggatgagagagacacattcctggggctggagaaagagtctctggtaggagatggaataggttgggagaaagaaagcccagcctgttctgcctggggtccagcgagtatgtgcagtcttgttacatccagcagcctgtctagagataaatgcttggaacaa

SEQ ID NO: 850 - protein, 2053 aa, Mus musculus
PFQPRSPQPLCPKMGRGAGREYSPAATTAENGGGKKKQKEKELDELKKEVAMDDHKLSLDELGRKYQVDLSKGLTNQRAQDILARDGPNALTPPPTTPEWVKFCRQLFGGFSILLWIGALLCFLAYGILAAMEDEPSNDNLYLGIVLAAVVIVTGCFSYYQEAKSSKIMDSFKNMVPQQALVIREGEKMQINAEEVVVGDLVEVKGGDRVPADLRIISSHGCKVDNSSLTGESEPQTRSPEFTHENPLETRNICFFSTNCVEGTRIVIATGDRTVMGRIATLASGLEVGQTPIAMEIEHFIQLITGVAVFLGVSFFVLSLILGYSWLEAVIFLIGIIVANVPEGLLATVTVCLTLTAKRMARKNCLVKNLEAVETLGSTSTICSDKTGTLTQNRMTVAHMWFDNQIHEADTTEDQSGATFDKRSPTWTALSRIAGLCNRAVFKAGQENISVSKRDTAGDASESALLKCIELSCGSVRKMRDRNPKVAEIPFNSTNKYQLSIHEREDSPQSHVLVMKGAPERILDRCSTILVQGKEIPLDKEMQDAFQNAYMELGGLGERVLGFCQLNLPSGKFPRGFKFDTDELNFPTEKLCFVGLMSMIDPPRAAVPDAVGKCRSAGIKVIMVTGDHPITAKAIAKGVGIISEGNETVEDIAARLNIPVSQVNPREAKACVVHGSDLKDMTSEQLDEILRDHTEIVFARTSPQQKLIIVEGCQRQGAIVAVTGDGVNDSPALKKADIGIAMGISGSDVSKQAADMILLDDNFASIVTGVEEGRLIFDNLKKSIAYTLTSNIPEITPFLLFIIANIPLPLGTVTILCIDLGTDMVPAISLAYEAAESDIMKRQPRNSQTDKLVNERLISMAYGQIGMIQALGGFFTYFVILAENGFLPSRLLGIRLDWDDRTTNDLEDSYGQEWTYEQRKVVEFTCHTAFFASIVVVQWADLIICKTRRNSVFQQGMKNKILIFGLLEETAAFLSYCPGMGVRMYPLKVTWWFCAFPYSLLIFIYDEVRKLILRRYPGAIPRDHIMEPGKEKEVEAPGELNQKPRPSTRSSTTNRQPKMKRRKKDLEELKKEVVMDDHKLTLDELSAKYSVDLTKGLSVLEAQDILFQNGPNVLTPPPTTPEWVKFCRQLFGGFSLLLWTGACLCFLAYGIHVNYYKENANKDNLYLGIVLSAVVIITGCFSYYQEAKSSKIMESFKNMVPQQALVIRDGEKMQINVRDVVLGDLVEVKGGDQIPADIRVISAQGCKVDNSSLTGESEPQSRCPDCTHENPLETRNIIFFSTNCVEGTRIVIATGDYTVMGRIASLTSGLQMGKTPIATEIEHFIHLITAVAVFLGVSFFWLSIILGYTWLDAVIFLIGIIVANVPEGLLATVTVCLTLTAKRMARKNCLVKNLEAVETLGSTSTICSDKTGTLTQNRMTVAHLWFDKTVYEADTSEEQTTGKTFPKSSDTWFYLARIAGLCNRADFKPHQESVPIAKRATTGDASESALLKFIEQSYNPVSEMRQKNPKVAEIPFNSTNKYQMSIHLLEDNSEAHVLLMKGAPERIFDFCSSFLLNGQEYPMDEEMKTDFQNAYIELGGLGERVLGFCFLNLPSNFSKGFQFNTDELNFPMENLCFAGLISMIDPPRTAVPDAVSKCRSAGIKVIMVTGDHPITAKAIAKSVGIISEGNDTAEDIAARLNIPISQVNNKSVKAIVVHGSELKDMESQQLDDILKSYKEIVFARTSPQQKLIIVEGCQRLGAIVAVTGDGVNDSPALKKADIGIAMGITGSDVSKQAADMILLDDNFASIVTGVEEGRLIFDNLKKSIAYTLTSNIPEITPFLLFIILSIPLPLGTITILCIDLGTDMVPAISLAYESPESDIMKRLPRNPKTDNLVNNRLIGMAYGQIGMIQAGFFTYFVILAENGFKPLDLLGIRLYWDDTQLNDLEDSYGQQWTYEQRKVVEFTCQTAFFISIVIVQWADLIICKTRRNSLFKQGMKNKILIFGLLEETVLAAFLSYVPGMDVSLRMYPLKINWWFCALPYSVLIFVYDEIRKLIIRRRPGGWLEKETYY

SEQ ID NO: 851 - DNA, 47897 bp, Homo sapiens
cttctgtgttttcaattaagtaaaaagcttgggggctgggatttcagaagcagacagcacagacctgaatttgccagctgtgtagcctgaatcccgttactcactttctctagcctcagtgtcatcatctgtaaagtgagaattactagagtaccgatctcattattttttaaggattgttgtgaagatgaaatgaaaacatgtgtgtcatggtgccccattatgatcaaagctagggcccacaggcgcagtgggaccagtggcaaaggagaggagacttctaaatgggtctctactgttcactgcttcctccatctgctgtctcagtttacccagtcttctttccccttccatctcccacaatccccttgggagaggataacctacgccctgcctcagcttcctcaccacactcctcaacgcttcacaggtttatttccaaactcaacctgacatggaaatggttttcccaaaggacacaccagtgacctctgagttgacaaaaaaaaaagtgaccagctttcctttccccctggcatctgaaatctgaaactgttagttttttgccccttaaaacttgttcctctctcagcttcctggcccctctactcggcctaattctccatctctctggcttccctaccttgccatcttccagatcctcttcctctaccataggtgttactacccaggatcctcagacctctgtcctctagctcccctgcctgggccatctcctctgctctcctggctcagtgttcccctccatgcaggggattcccatggcccatgccctctcccaagctccagtccccatttctatcaccccccacgtgccttcatctgaagccctgcctggagcacctcaaccttcatatgcccccatgcaaacttgcggcttatttcccaatctcctttctcccctacccttattttagttaactttgcaccaacgtcctcaccacccccaccatctccaacggcttccttccttactctgatgtccaatcagctgccaaatactgaaattctacctcccaaacatctttttcatccatccctgtctcctctctgtcttgctccagaccttcaccacctatagcccccatcagtctctcccttccagcccaacatcccgtccacgtacaggcacacaccctgccatcaaatgagccttcctagaacgcaatttcaatgagattactcccctgctgaaaaactttaagtggctccatattgtttatagcgatatttctcaaacttgcttggtggtaggaatacaggttcccactctccacgcccaccctcatgaatcagaatcttgaagaaatgtacctgttcttttatagttttaacaagcacccaggtgattcttatcatcagagcctttttaggaaacactagcaattagagtggcaattactctggcattcaaggccctccatgaaatggctccaacatctatttccagtagtaccgcccatattccttccttgtgcagagtgcttctgctgtctgtgcctgtgctcacattgttccttctcctttatctctctgagtcagatcctacctatctgtccaggcccaactagaatgccacctcttccatgaagacctttttgattcttccaactgagaaccatctcccccttctctgggctcccaccaccctctaaatgctatggtgagcaaccagcagccagcaatacctggctcaacacagatgcacaagagttggcactttttcttcccctttatcttctggagcactcctcactgtcaccactgcatccagacagttctggtcatttactcctggggacaagaacccaaaggagaagcttcagtgggtccttacagcatggaagttaaatgtgcaggctctggaaacaaactaaccaggtttgaaccgcagcccccctacttgggtaagctgaggatctatgtgcctcagttttcccatctgtaaaatagagttgtgaggactaagttaagtactacatgctgtcttcattagttctggagactgggaagtccaagatccaggtgctggcagatccagtatctggtgaggggtcccttcctggtttgcagatagccaccttcttgctgtgtaccccacatgatggccagcagagagaagaagaaagctctctcatgcctcctcttaaaagagcactaatcccaccctcatgacctaattatctcccaagtgccccacctcctaataccatcacatcagaggttcaatctgtaaattctggggagacacaaacatgcaatctacaataagtgctcactaactgttagctatgatgagctacagatcttagggacaatatagttcagtggttctcaaatctgcctgttgattcatctggggagttaaaaaaaataccgatgcggctgggcgcagtggctcacgcctgtaagcccggcactttgggaggccaaagtgcgtggatcacgaggtcaggagttcgagaccagcctggccaacgtggtgaaaccccgtctttactaaaaatacaaaaattagccaggtgtggtggtgcatgcctgttatcccagctactcaggaggctgaggcaggagaatcacctgaacctgggaggtggaagttgcagtgagccgagattgtgccattgcactgcagcctgggcgacagagtgagactcagtctcgaaaaacaaaacaaaacactgatgcctaagccccaccttagatcaattaaaaacatggtacctgaagatgaggcctgggcatgggatgttaacatgaagctaagggtgagaatccttagctagtccaaccctccacccactactttattgacgagaggtaaaggacttattcaagtgcgcacagctggttaactgtagagcaagtcccacactgaaagcctctgccctccctctagcctaatccagagtgatttccaatacgatttccaatacgccattgcgcagcctttgctcccgcgtcattgggttgggagaatcatctaggcaggaggcagagccaggcccactcaacctcactcagcaaaagtagaggtaaagaagtggggaaagtttgaggaaatggaagtggggagtccctaaggactatgagcttgggaggacaaggtcaagaatggatggggggattttgtgactaaatggcatgagattctgagagaaaagacaatgagggtggggatcttgtttgccttgattgtaactgtctttctagtaccttgcacagaatatagcataaagtacgtgctcaacaaatgtttgttgaatgtctaaatgatgcaataacatcaaaaagcacatgttctgtttattaagtcacccagagggcactcacattcctcaagggggcagtggtgagaacatccagaggggagcacaaaagtaaaagaatcttggactttcagagacactgaggcacagaggaggccaagctccctgaaattccgaggagaggctgctatgtgggagggaggcagtggccctgtgtgccagatgtttgcagggcatcctgaactctctgagcatacagaatgccacaggggacaggcagataaacagagctgtatcctgggccaagtggagggggcctggtaagggaagagggaggtgggaagaaggaggctgggggccaagccagctgcctcttgatagggggagcggggaggcggggtgctctgggccagtggttggttcagatctctggccaaagcaaacctgcctcagggggctgggggacctctccctccctgcccggatggaatcaaaggctaacaggaaccctggagggtccagctgtgacccttgctcctcacactcagcagggcccattaaccccgtcctccccatatcctcaacacacttttcccagcccaaagaatctttgcaaacagactcccctggtatttgctgatcagataccagccaagagatgtcaggttttcccagtctcaccaccagccctgccttcctcccccaaagatacccagaccctgtcccacctctcacagcggtgctctgtaagaacccagggtagcctttgctcaaaccggagcccttccttttttccatgccaagagttaaagggattcgattcatttctatgagtcataataataaacaaaataggagcacctgcctccatgctcacaaacaagacaggacaacctaccctcttggatctccttctgaacccaggtctccaactgatggttctcacacaggtacaacctgcaggtaactcctgctgtttacctgagctgagctgtgcgctgaggcagaaatagcctggaatttggggatcatcagaactggagagggacctcagagattttcttttttttttctttttttgagacagagtctcgctctgtcacccaggctggagtgcagtggcgcaacctcagctcactgcaacctgcacctcccaggatcaagccattctcctgcctcagcctcctgagtagctgggactacaggtgcctgccaccacgcccagctaattttgtgtgcatgtgtatttttagtagagatggagtttcacgcattagccaggatggtctcaatctcctgacctcgtgcctcccaaagtgctggaattactcacagattttctcatcccgttccttgtcattcagatgaagatgccaaggtcagagtagagaagcctcttgtccaacatcacacaggtggttagtggcttcagcaggactagcctcagctgacttgactttcaggcaagagtccattgcattggaccacggtggggactgtgagaggacaggagggaaagcagaggcacagaatagcccaggccttcatgctcctgggaagggttgacatgggttccctgggctacaccatgggtcctttcctttttctcccttgggacttccacgtgaagaaggcacaggcagaacacaacatggagctatctgaatccagagagaagtaagaacgaaaggaggtgggaatgcagcacaggcagaggctggggaaaatgcttctgggtgcttttacatcctattttctaaattctatacagtgtggttttaacaataaagaggataataaaaatactctggggagagattaaaatgacagaaccagctgggtgtggtggcgcatgccaatagatgcacaactctggaggctgaggcaggatgacggcttgagcccaggaggtcgaggctgcagttgatcatgccgctgtactccagcctgggtgacagagtgagaatctgtcctttttttttaagggagagagaagaagaattgtttttttttgtctgtttattgttttttgttgctgttgctgttgttgttgttgttgtttttgagacagggtctcacttcgattgcccaggctggagtacagtggtgcaatcttggctcactgcagcctctcaacctccctgggctcaggtgattctcccacttcagccttatgagtagctaagactacaggtgcatgccaccacgctcagctaattttttcgtatttttattagagacaggtttcaccatgttgcccaggctggtcttgaactcatggactcaggtgatctacccacctcagcctcccaaagtgctgggaaaacaggcatgagccaccgcgcccagccagcagagatttttagaatctactttgagtagactgaaaagaaagaccatgttgaaggaatggtttaacagataaagaaaaaaaataagataaaaataaaagaaagaccaaaaagaaaacggaggagcagatgttaaaggagagatggggagaaaattcaacaccatccttgtagtccagtgaggaaactgacacagcagcaggacttggacagccactctggggctctgagcccaacctttttatatttatttatttatttatttatttatttatttatttatttatttttgagacggagtctcgctctgtcgccaggctggagtgcactggcacgatctcggctcactacaacctccgactccctggttcaagcgattcttctgcctcagccccccgagtagctgggattacaggcatgtgccaccactcccagctaatttttatatttttagtagagacggggtttcaccatgttggccaggatggtctcaaactcctgacttcatgatccgcccacctcggcctcctaaagtgctgggattacaggcataagccaccccacctggctgatcccaaccttttaacaggtcactataacctgagggagtgggaggacagagggctggagaggcagggagagtgagaagtcatctttcttggacacttgtcatggccagtccaggccttcccggctcccctcatctcatcccccaaggtgggctccctttggaagcagaaaaactccacccacactcccagaagacctcagaagcctgatagcagtgacaagaccacaggccctaaagaaaaaaagaaaggagagttagagggaatggaagaaggagaagaaggagagatgcccagaggggggttggcagccgagaggaggaccagaggagcagggctggagagctgggcccaaatcaggactgggggagagaagtggggtgccggggcgggaggagggacgatgggggtgatagagcctcccagctcttccttccctcccactctccctcctcctctctctctttcatgatcttgaaacaaccttcaagtctgggctggaggccccaggaggccagtcacttaggaaacaaaactgtttcttggagaccttgaaagcccatctgcagctgagcagcgtccccaccccctccctgtgcacacacacattctcccatggactctcacgtacacccacacccggcttcacatgagctccccaatggcccacatgcacgcacacacggactccacacttgatcttagccaaaaggccgagaagcgatgcgcactcacggactcacacgcacctctgtactcatgcttgcatacagacaaccgattcatagcagattggccacacatccgaatgagtgttgtcctctcccctgaggagctcctcctttggaatgtggtttggtaccaccactccgtctcatacctcacacaggacccaacgctcaggtcctcccagtcattaactagcacacatctgtacacaggcacatgcacactcctgtctctctccaactgtcttggtctctctctctctctctctctgtcacacacacacacacacacacacacacacacacacacacacacacacttcttaccaaccaaatatttgattcaggaccactccatccccactttgcccttggtggatccccctcctgatctgtgactttctcagcccactccccagcccaggcatcttggccttccatcctcctgctttcaagtctttctttctctctcctttgctcctcttactccaagggccttgatccaaactggtactgctgactgtgtttgaagaaacagtagcccaacccaggcactccagatcaaacgatcaggtgtctacacctgttaatatcctggaggctgaggttcatggtggacaagaaggaggtagaccactccagagcctcagctctcactgggcaaggagggtggtcagtgatgcacggtggaagtataggccctgggtgtcctgcccactctttgatttctctgagccctaaatatgtgagcagcagcgcccctcgggctgtgctctcgcccaaatgcagggcatggcagggagccccagcaggctgtaggggcagaggaagggcacatcctttccggtattgagtttggccacagggaccagagccagggcctttggaaggactgggcagtactgggaggtgccagcaggggtgaggggtgggatgaaaactgttagagtgcttgaggtttgcacaccttcagattcggggactgacgttttctctcctatctcaggttgtgttctggagagggctgggcagaagattacccaggaattccaacccaggaacctacggaacaggcgcttcctaaaccccaatttatcatgttgttcccacagcccccaggcaagcctgccccaatgttgatctccctagctgcctcggggccactctggagtgactttgctttagacagtctctcctggtgtctaaccacaggctttcccgctactcccctctcactctctccttaacacacaggggctgaactggtatctgttcccttcattgtttcctccctctgcccattctctcccaagaccaaatctgagctcggagaggggggccatgagaaggccctgttggccccatcctacccaccctttctgactgtaacccagagagggaaggagcgtggaagtgagatgtgacctaccaggtccctgtaatggaaaatctcaactgcaggcccggagggggccagttatttagggaattcagatgttagccttgtgccctgagagtggatttgctagaggagaggctgataatccctctgcagggagttccctctggggccagagatggacccagcccagccagcaggcaccttaggcctctggccaaagccccccttccctccctcccttcctctctgctttctttgcactcaggacacttagacctgccccactccgctggcttcccctcactccatctctgtgcccagagaaacaggggtactccaggggaatcctgtcctctgactgttcccagtagaaggcgggagcagaattttttcttttctctctgccccttctgggttccccttcctctctgtgcccctcatcctttggattactcatcaaatgagcagcaacaacacccctagaccagctggtcctgtcctgggtcatctcgttgtccccagtttctagctggtataaggttaaagataccctttccagccccaggcaaagccttaggcatttctgggattgctcctgactctgatgggcatcctcactcctcagacatttccaatctcccccacttcactgcagagaggcctgttctccagcctcagtcctgcatgctgcagctttgcttccccttccccactggaagaaggaaacagtcgctctcctttcccgttcacatgtctgatatttgctatgatattgaccttcacacacatcttagaggttctgtattttcctctcttttgacttctccctatcactactctactcaggcatagattcagtctagagctcttcaacagcaatgaaacggtaaacgaggggtaaacaaaacccagagatgtcatcaggtgcctgctaggagtcccacccgttcccctctagccctggcctgcccctccctaccagagtcttgattctccttcaaaactttggagaggttacatctggcagggtttggggacaccctcttgcctccatctccaaacttcccgctgcctcccgagccacctttgactcctcctgggccccccttccaggtgcctcaagtgcagaggtcagccttcggttcaaattctatttctgggcttcagtgtccctgcaacctctataatagaaggaacagagtggtctatgtttctttctttctctgggagattggatgtagactcgggagacctgagttctggctctgtcttatcaattcaaattgtttaatctctctgagcctcagtttacccacttggaaaagaagagttaggccacatggtctctgtcatcctgggattctgagtcaactgctccccttcagccagatcctagggggcatatccccccaacctgggacccaggcccccttcccttgcagcctctctcagttgtgagtgccacaggccagagggggttgagaggagccaagggggggcatgccgtgggacaaacgggctgtctagggccagtggctaaaggggcgggaggggaggagtcctcagggatcctgtttcaacaaacgtttctttcggaggaggggaaggcgggggagagggggagaaggacctatttaaagctaccctgttgctttggctttctctgtctgccagggtctccgactgtcccagacgggctggtgtgggcttgggatcctcctggtgacctctcccgctaaggtccctcagccactctgccccaagatgggccgtggggtgagtatccctaaagagcaggggtcgcagtctagagggtgagggaggctgctgaggaaggatgaagtgggaatgggatgtggaaggagcgggagagaggagctgagtgggatacttggaacttgaaactaacagtctccaaactaccaatgtgtgtacagatcccacggcggtcacataccctagtgctctcctctcctctgcacgccccagccccctgcccacagttagacccacagcccaccacacatgccccctccatctctccctccaccccactcccacatctctagtccttccctgcagcagtccctcctctcactgcatctcccggcctcccagctgaaaggatgtttggcactgtgagtcctcctgtctttgccacctcctgaaaatatccattcctctgggagtcctagcctgagaggctgggggtccattttgaggttagagaggggcagtagagcatccggctcccagagtcaccaagtagttccggacaccagctccaggggccctgagtgccaaggacagctgggcggggtgtggggaggaagaatgatgccccagcccccaccccagcacccctccggatgtcccgagcagcattgtccgtgggttccaagccatgggctttgaggactttcccagaggctggtgacagtgacccccccccagtccacccgtccatggcattctgcagcaatggctacaccaagaggaagattaacaacaatggggcgggcagggagagggctttgaattcttggaaatgaaattcccatatggagaagagtggcccaatccttttacatgctgtgcctggctgctttccttttgtggaatactggcaaaagaggacacagagggaaagggcatgctgcggaacaggagggtatgaggaagactgtgcctagggggagccgtgggtgtttctgggcccaggaggagtcaggcaaggacatgttattgcacctagttgagcagctgggaaatcctgagcctggacaccagggttcctgagctagggttggagccataaatagaattggagtgcatgcatgtatctgtgtgtctgtgtctgtgtgtgtgtgagtgtgtgtccttgaccacgtgttctccataggcggggagtcctgcagttactcatggatgagtacctgtgtttgtgtctcagcaggcaaatttgtaaatgtacaagccttcaagcctgcacaagcataaatgtcactgtgtgggggtgcttgagagtctgtgagcctgcccttaggagctgtgaggtatgggcttcacggaggaagaggtcatagctgcaggaagatatactgtcttgggaccttcagctgcatcttgacatctctggctccccatggaaagggcatccctagctgagatgcaggacctctgagaagaggcaggggttaaaggatcagataagccctccatttcccccatccaagtgaagagagaaggaggggaggtagccccctaccctgctccatcttagagcaaggtagacccagctcaggaggtcttgcttgggaagtgatgagaccttgacttttccagtctgtctttttcccctagcacccccaaactccccttaatcaccatcctaagttgctgtgggtgatgcaatagcaagatgaggagcagatctgggctgtttaaactaagaggctgggtgaggtgggggtatttagggcctggagcttagagttcaacctaccaacgacccctgaagagggaaggcatctgacacccacaacctgttctagggatgatttttcctccaatcccttctcccctgcatctccactgcagaggcaggcttcactgtccccccattacccagtggctgtgaagggcagcgtgggagttgggggaagggacgacactggtgggagggagcccagcctgctccagctaccacggagaggctgagatggggggagcgttggcggattcccagctgcccccactctgtcccagcctctggctttctcaaaaaggactctctgttctccttcagcattcaagacccagagagggggacttgtggttgggggagggaggagtggagggaggttgggggggtccttgcttcctctctttctttcttgcctgggcagccgctggccccaaatctctgcaggctcctggctgcagagcctgagatctttgccaggacaggaggagggggaaggggcagtgtgtctcaagctctaagcctgctggagagcagggcgggagcttgggaaaaggaggcactgcgtggagctgcttagctcagccacaatccagcatgccaaagtgcatggaccagcaagtttttaaaaagcatgcattttattccaatttttatgaaatttatttcacatctgaatatacagaaattcctctgcaccctgctcttctgcccacagacccagccctgctcctctgtgtatgcctgggcccccttctgtccctgaagttcctgagggtcacactgaagctcagccagcctgatctcttgcctctgttcccttgattgcatttcttccttttctcagctctgtcccaccacagacagttagtgaatgtaaagcatttcaatccactcaattaaatgaatcctcttaggtcacctgagaaaggcagaggcagaaccactcacaagcctttccccaccccttccattgggctgctcggtctccccaagaagatctgcctttaggaggccaaaattataccagattcatagatgcttcaggtggagacaaacccacgattttactggtcaccttttctgagaagagcacttctgagcaacacagcctccaaaagctcatatctttttaaatcattggtatcttgggaacaacagtgttgacttctccttgcatcccccacccctacccttgcttctgattgtactggtcagacttctacctctcaagatgctgaattggcgacctcttatgaacaaggcagctgccatacttctgggattgctcctgactctgataagtaaaaaaggcattaccctggagcacaaaagtcttagggcagtgaagctattccatatgataccacaatggcggatacacgtcagtatacatttgcccaaacccatagaatgtacaccaagagtgaactcaaacttaaactatgggctttggacgataaagatgtatcaatgcaggttcatgattgcagcaaatgtaacactctgatgcagggtgttgatagtgggtgaggctgtgcatgtgtgggggcaggagatatatgagaactttctctacttcccactcaattttgctgtgaaccagaaaattgctccaaaaaaagtatattttttaaaatgcaaacaaaacccccaaaactgcattatcctgcaaaaaaaaaaaaaaaaaaaagcaaacaccttggctgtggaccctacccaggtatccactctttatgggaaacaaaagttaacatcatagtgtgggaaaactaattcctgaaagcctagtgcagactttgcagaatccagtggagaaataggcaccaggtggaaactgagcagcccctctatgacaaggactctatttcctgagggaagtgggaggagagaagactggggcagaagaggaagtaagaaggtacctttttgggaacttttcatggctacccaggccttcctcagcctctatcctattctatcaccccaagagggcctcctcttagaaggaaagatttcccaccctgtccccaagaagttccctgtgagaccctggaaggctggtagtggtgagcccacaggccctggagtggaagggaaatcaggagcctcataagactacaattaaaatgtccatctgctcaggcgcagtggctcacacctataatcccagcattctgggaggccaaggtgggaggatcacttgagcccaggcaatatagtgagaccttatatctaaaaaaaaaaaaaaaaagaaagaaagaaagaaaattgttttaaattagctgagcgtggtggtgcatgcttgtggccccagctacttgagaggctgaggtgggagtattgcttgagccctagaagcggagggtgcagtgagctgaaattgcacactgcattccatcctgggtgacagagtgagaccctgtctcaagaaaaaaaaaaaggccatctgattcaccagatgacccaggaatgtctagacttaaaaactatataaaatgtagttttagatttactctcagatacaatttcttatgttttgggacaaatggggctcagttcccatgttacccaattgtgctttgggggtccagtcctgtgagttgcctcccgtctagtaacgggcaggcctgcccagcaggatggagagggctcccagcacaccccatgtctccacttcctggacatgccctgactctccagctactgcctcctctcagtccatcaggcctgctctttccatccctaccattccaccaccagacctggctctcctctggacacgttcctgcctaatcccctggctccccaaagactcttactcccccaagttcctgagtatttctacccctctctaagtaaaattgccatggtgttgggctaagacattcctacagagtgattctactccctcaacaaccccccacaaaaccctgtccactcccttccagaattttcccaaatagtgtaggatacaggttttcaaaatttttgttttgttttgtatttagcagcagggtcctttcaacaaacaaaatcttagcagaagcccaagcattaaaccactcaagtggtgcttttcagtcctgagcccctcacccttctctgaaactcacatgggagcccctggttctgccaatagtctacaaactgagggcctagggtccctcaccctccatcccccctatctcccccaaggcagccgctgcttttgaacacacacccccactgcctgggctccctggctgagtggtgggaatggaggccccagcccctctcttccctgactctccggctctccctccctcaggctggccgtgagtactcacctgccgccaccacggcagagaatgggggcggcaagaagaaacagaaggagaaggaactggatgagctgaagaaggaggtggcaatggtgagggaactgctgggccatggaggaggggccccatgctgggagagctgtccctgcagcccattgcactcagagaaactccgtgtcccccatgctgctcaactcacccctgtgccctgcagtaccctcatatgcatcttagatacctcctccccaaagtaactcaccctcccttccccaggatgaccacaagctgtccttggatgagctgggccgcaaataccaagtggacctgtccaaggtgagtggaggggcttctagggaaggaacaaaagaggcaagaaaaccatgcagcatcaaggtggcaggagccttaaaactgtaatccagccttctttacagatgaggaaactgaggcccagaaacaaggactggcccaaggacatgcagctagttggtggcacagccagaactagaatttggatcccctgcatcctagcccaaagctctctccctgtataccctagaagccaggactccctatgacccaggccccagagggcctccaggcagggcccttccctataccccaagcaacttcagttgcacacagccttccacagagctgacagctgatgcacatgggctgacagcccattcctgtggttacagtgatttgctgggcccctgctacatatgtgacattgtgatagatgcgttacatacatttctctaatctttacaacaaccctttgagataggtattgcagacctgtttattaaacaaaggagactcagagagggagagtaacttcccaaggtcacatgaacagtaactggtacagtcaattgctaagcccttcaattaaaaatttgtttaaaaatcattaatcaaaaaatgctgggtgtggtggctcatgcctataattttaccactttgggaggccaaggcaggcagatcacttaaggtcagcggtttgagagcagcctgggcaacatggcaaaaccccatctccactaaaaatacaaaaattagcttggcacagtgatgggcacctgtaatcccacctactcgagaggctgaagcaggagaatggcttgaacccaggaggcggaggtttcagtgagccgagatcataccactgtactccagactgggcgatagagtgagactccatcttgaaacaagcaaacaaacagacaaatatttagtgggtgtatatctcctttatgggccttccctgactgctctttctaaaattctatgcccctattcctttaccttactttattttccttagtaacacttttctatctggcactaatatgtatttgtttattgtgtgtcacctctccagatcataagctcctcaagggcagagactttgttggtcttgtccatctctgcatccgcagagtgacaattgtgcctggcactggatatacatttattaaatgaatgaatgaatgaaaaaaaaaaaaaaagaaacggtccctgctttaaaggagctcaaagtctagtagcagaaaaaatgcaatcctaggattccaatgcaatatggtgagtgcagctctagaatcaagtatagaacaccatggggaaccagaaagaagcatctgaaccagcctggggctgagggaatagggccaggcaaggctttctgtggaaagtgacaggtgattgccaaagttgtgtgacactgatggtcaataatgtaggacttgagcagggtgtggaggtgcccacctgtagtctcagctacttgggaggctgaggtggaaggattgctttagcccagggttcaaggatgcagtgagctataattgcaccactgcgctccagcctgggcaacatagcaagaatccatctcttaaaaaaaaatctaggactctcctagaatccttgataaaataatctgaaggaagagagatggggaaaaaacagttgaggtgtctttccagggagcttatccagactgcctccaggggagatgttatggccctaaccataggtgttgtctcaatccaatataattaggggtcaagcccagtcaaacccttctcagccctcaagccctccaagttgcatcacaaatgccacctcctccatgtggtctctcctgatggtcccccaccccttccaaccaggtgggactttccttctgggcattcttcccatgcccgggagctgaagggatgggcatggtgactggctgggttggctccggatgcgtgcccctacgcctctccttgctccctcagggcctcaccaaccagcgggctcaggacgttctggctcgagatgggcccaacgccctcacaccacctcccacaacccctgagtgggtcaagttctgccgtcagcttttcggggggttctccatcctgctgtggattggggctatcctctgcttcctggcctacggcatccaggctgccatggaggatgaaccatccaacgacaatgtgagcccacacgcctgacccgggaacagcccgtgactgtcctccaaccctgaacccccaacacagtggggggtgggcagggaacaaggccctcacataacagtcctacagatgcccctgcatcttaggctggaaaggggagaggcttctatatatatctgtaaagtactcctccgccaacagtgcatacacattcacatactcattaattaatgaaacaatctctccctgttcctccccgcttaagtgagcctgtctgtgtgcctgggtcttcatcccctagcaaagtcctaaccctgggaacttcctaagactttccctcccatttctagtcttaacaggcttgaggttggcagatcaagggggaggttagtgagaagggctttcccctaccatcatcactctcagtcacagacaaaggtctgggctgtcatcttggatggcactgcctgctcatcccaagtggcagctgcccctttagggttggggggaaggtcaggtccctgaaactctttctccttaccagctatatctgggtgtggtgctggcagctgtggtcattgtcactggctgcttctcctactaccaggaggccaagagctccaagatcatggattccttcaagaacatggtacctcaggtaagatggcagggctgggctctgggctaggctgtaaggttttggcaagagtccagctcatcttctgtcagctcccaggcactaagatagagatggacagaaaagatcctccagctttccatgccagcacctaattgtttatggggcttctccttctgcttgacggtgtgggagaccagcaggagaagaaggcaggggcagagacaagcatttcatgagctgcctgtggctccccacagcaagcccttgtgatccgggagggagagaagatgcagatcaacgcagaggaagtggtggtgggagacctggtggaggtgaagggtggagaccgcgtccctgctgacctccggatcatctcttctcatggctgtaaggtgaggaggtcataccagagcaagcagttgagtctaaggagaaggctgtgtgcagagctgagaggggcccagtgaggtttaaaggtggagagacccaggtccaaatgtcaacaccatgcctacgcccctgctaaaccttctctcagtgtggggtgcttgtgcagtgcctccttgcatctgtgtgttatgaatgctctatgccccaggtatttctttgttgtccactttttagcaatcgtgtattgaataccaattatgtgtcagctgctttatatatgttcgatgtgctatctgatgtaattctgaaagagtggtgtaatcatgcagggctgctgcatgtggccacacacgttgcatcctgaatgaccccaggaggtgcattttcataactacagtgttagtgtctccccctgtggttgtgcaaggcagagattctgtttacattcaccattttacagttgagtacatggaggctctcttggttaagcaagtaacccgaggtcacataagaagtcaggaggagtcagaattccaaaccagggcaggggcaatagatgagtaatgccataaatatgtgatgagggcaagtgtgactttgttcctcgtgtcatgaagattgagtgtggttggaggtggttcaggagacagctgtgtgcatacaagtggctctgccagtctgatgactatgcactccttcctcctcaggtggataactcatccttaacaggagagtcggagccccagacccgctcccccgagttcacccatgagaaccccctggagacccgcaatatctgtttcttctccaccaactgtgttgaaggtgagaagccaggctgccccctgtaggaaagagtctgaatcctgaatccatagtcaggatgaagggctctggtagtacttacctggcaaaagctctgccattggtggggcaattgaggggtcagggggccctgaatattatggaaacaccctccacagagcagggtattgactgagggcagcctgactccatgggaaatgtatctcccttccccagggagatctctgttctgtccaccccaagacttgagtggatttcaaagctttcaggtattgggttaagaaccccttacgcatgcgcacacacagatgcacatacgctcagaaccaacctggattcttaggagtctttggatttgattgatgcttctattccttgtggttctgggcctcgctgcccccttcgataacctttgctttggccagggccccagggtctgggagggccaagaaggcattctggccaggtgaacacttggggcctacttcaggctgcttctaacctttgttacatcaaaagacatgtttcaccatgcacagactacccagtttgccccatccctgttctgggttctagagataaacaaaggtcaataagaactcccagagctgccattacttaatggcaggggtccaagcacaactgaaacctgtgccctctgtggtaaagccagtgagcagagtcagggctgcatcagagaaggagtaggagggaagagacagaaagaggcctcactagaccagtggcctctgaaaatagggcaaaggaggcctcatatcccaatccacacttcccctgtccattactcatttctcctcagtgtattatgtttctctgtggtttttttcccttcttcgacaagttggaattccactgcttggaatccatgagggattggttccaggacccccttcgttaccaaaatctaaggatcctcaaaggccctgatatgaaatcgcataatatttgcatataatctgcgcacatcctcccatatactttgaatcaactctagattacttataataccgagtgcaatgtaatttttatactgttttgtttttaaatttgtattatttttattgttgtattgttatttttatttagctccaaatattttcgatctgaggttggttgaatctatggacatggaatctgtgaatatggagggccaactgtacaaataaaaatcaccacacattacatttcctaagtttgttttttgttttgcttttgagacaagatcttgctttgtcacccagactggagtgcagtggtgcaatcacagctcactgcagccttgacctcccaggctcaagcgatctcccacctcagcctccagagtatttgggactacaggcgtgtgataccacacccagctaatatatatatatgtatattagagatggggtctcactatgttacccaggctggcctcaaactcctgggctcaagtgatcctcctgcctcagcctcccaaagtgctgggattacaggcatgagccaccgagcctggccaaatttcctaaatttttaatgtactgagattttgaaatttacatttcccacaattgatttattcagaaatgcctagtaatacattcctattgcttactctgcaattggctttgaaaagaggaaaggaaataaatgagatatttgttgagcacccgctatgttccaggcactggcctaagtatattaaagcacaatctcatctaaatattaaaacagcaccgagataggaattcaaataaggattcaaacccaaatttggctggctccaatgtgcatgcttttttcaatacaccacccttccttcccagaagacccctgtaatgtcacacaagggttagcaattgcctggcttcctctatagagattcatgcctaatgttgagaaagaaaatcttaagactggatggaaaatccataatgagtgctttactttgtgttcataatatacttttggatggtatcaagtatgggaatgattttaccaaaatgccacaggcaatttttatttattgaatcttgtctatttgaactttgagattatttgcaagcttctccccaggctcgagtacaagagaaaataatttgctgttgtattgattcaaggattggcgatctatccagggaaaggaaggccaagtggggacaacctactgaatgtggcctccagatctgcggctttggctcacctatcctgtgatgattttccttgctcaggaaataggatgggactgcagtccctgggagccacaaggcacccaacctgatgccccaccatgttgcaggcactgccaggggcattgtgattgccacaggagaccggacggtgatgggccgcatagctactctcgcctcaggcctggaggttgggcggacacccatagcaatggagattgaacacttcatccagctgatcacaggggtcgctgtattcctgggggtctccttcttcgtgctctccctcatcctgggctacagctggctggaggcagtcatcttcctcatcggcatcatagtggccaacgtgcctgaggggcttctggccactgtcactgtgagtgggtcaggctgaggtgccaccaggggagggtctcactactctttcctcagagtgatagaggcacagttgcttgtagcttctcactactttttccccctagagtcacttattggatgcgatactcagagatcacttaatacatggcttagggtatgagttgagaaatctcaggtggggctattcttaggcactcagtttctcttttggagcttgtcacggctgccttttctcacgatctgccagcagtctgggtctcattccgtccaagtctcctgtagaggctgtctcaaaggtcaccagtcactaactagcaaatccagggaccttttctcagctctcctccctaactctgctgctgaaacagatactgctgtccaccctcctaccattctctcttttgtcgattgctgtgatgtgtcactatcctggttcgcctctcctctgtcccttcctgctccccctacactgattctcaggcctcagctgtctgttcttcctacaccctgagcaagagccaatctcctcccagtttgcagtgtcccttctgtgttgatgactcagacatccctatgctcagctctgctctggccctctctggagctctagtcaaacgtcttaaaccccctaatgggcatttcatcttaacagatactcatgatctcaacacatctaaaattgaacattcattatttacagctaagtcccacccattcaagttagtggagtagaatcaggggaggaggaatggagccacggtctagggtaaggttatggccatctccggcttcagccttaaccttttttattctcctctttctctaccaggtgtgcctgaccctgacagccaagcgcatggcacggaagaactgcctggtgaagaacctggaggcggtggagacgctgggctccacgtccaccatctgctcggacaagacgggcaccctcacccagaaccgcatgaccgtcgcccacatgtggttcgacaaccaaatccatgaggctgacaccaccgaagatcagtctggtgattgggtgctccagagggggtggataggattagaggaggctgagggcagtggcgtggtggggtgagtggttgagataaaggctctaaagggagccacgctcctggttccccctcatttcctcccaggggccacttttgacaaacgatcccctacgtggacggccctgtctcgaattgctggtctctgcaaccgcgccgtcttcaaggcaggacaggagaacatctccgtgtctaaggtagggggtcaggacacacaccaggtatgttttgggggtgtctccaaagcctcttgctggccccagctttccttctcacatgatgtggctgccttgggggtttcagtgccgccttcacctgatcctccactcccttccctcccatgctgacactgaattcttgtctcttctggcagcgggacacagctggtgatgcctctgagtcagctctgctcaagtgcattgagctctcctgtggctcagtgaggaaaatgagagacagaaaccccaaggtggcagagattcctttcaactctaccaacaagtaccaggtctgcttgggttgccaggacagaggaagagagagggatataaatgggtgagggtggacaaagccaaggggaatcatcactagcaggagtgggggtgtctgagggtcatgttccctccccctgctaagtcccccaggacagctcatatgactgcatgtctgattgcaactagccccagctcccaaaccttactccatcccttactacaatctgtcactctctcaactcttcttcccatagctccgcatcctctggcctagccttccaactcttctaccccagtcagtgaaaccataattctgtaattcctttatggtgccccttagcctttaggcacctgttaaatgccaagaatgcaatctcagcattccttattatccatagaggtaaagccccctgaggccaggtggtggtggggatgctgaggagggagccgttcagcccctagcacagtgcctgtcttaacctgacctcaataaatatttgttgaatgaaagactgtcctacggaggtggctctcaggttacaagtgttggaactgtgaggtctaaacacccccctgcacaaggagattctctttgttgacaatctttgatgggttggggctacttttctaaggtggtttccttaccagctgctgctctatgccgcgctaccaagacaagtatggccctctctgtaactacctgttgtctctccagctgtctatccacgagcgagaagacagcccccagagccacgtgctggtgatgaagggggccccagagcgcattctggaccggtgctccaccatcctggtgcagggcaaggagatcccgctcgacaaggagatgcaagatgcctttcaaaatgcctacatggagctggggggacttggggagcgtgtgctgggtgagaggccagaaacaggaggctcagaaggggattcccaagcctctgcggcatccctggggtgggggactgtgggggcgtccaggaagccactctgcggatctcactgatcccttctgcccccctttaggattctgtcaactgaatctgccatctggaaagtttcctcggggcttcaaattcgacacggatgagctgaactttcccacggagaagctttgctttgtggggctcatgtctatgattgaccctccccgggctgctgtgccagatgctgtgggcaagtgccgaagcgcaggcatcaaggtactggcctcccatcctcccctccattctagcctcccccatgccagagttcaaggagctgcagtggctgctgccctggaaaggcccaggccacggtggcctccttcccactgactcagagaagaagctgtccatctgcaaggaaaggcccacccctgccttggggcactcacccttatcccttttgctcagagaggccagtgtcccatgcccctcctctccctccctggcacagctctttgtcccatctgcatgtgtacccttccattctgatttgaagcataatctggcactcctatcttgaagacctagttgtcctacccttcccaactactgcccaccctctctgtcaacttaggatgggattagcaggctcttgtatgctcccagtggctcagcccataaccccacagaatgcctcccactcaaggttctcttgttcaactacaattgcttctcactgaccactccctcctctgtgctatgtttgttcttcattcaacaaatatttactgtttactatgtttcagacactgtgcaaggtgcaaactctagcaccttgcacagtgcctgatacatagtaaacaatttgtgtcacatgacacatctagatgggacaatgagctgtgccagggaggacacatataaatcaggcactattctaagcactaaacctctatgatttcatttaatctacgcaacaaccctgtgaataagcaccagtatttttccttttttacaaagagggaaactgaggcacaaagtaacatgccaaggccacacagctagtgtaagtcatagagcaggtacttgaaccaaggcagtctgctatttcttaactatcataccaggagacttgtttctgtgggtgtatgtggtttctgaaccccataaccactctgtctccgaggcaggcatcattatccctgttaaaagtaaaacaaggctgggcacagtggctcatgcctgtaatcccagcactttgggggggtccaaggctggtggatcacctgagataaggagtccaagaccagcctggccaacatggtgaaaccccgtctctactgaaaaaaaaatacaaaaattagccacgtgtagtggcaggtgcctgtaatcccagctccttgggaggctgaggcaggagaatcacttgaacccgggaggcagaggttgcagtgagccgagattaggccactgcactccagcctaggcgacaagagcaagactccatctcaaaaaaaaaaaaaaagtaaaacaaatggaaactgcaagtgggtaagtcttttccccaaaataaaaccaccagtaagtgatggactgggactatgaagcatgatctgcttgaccggaaagcctgagctcctgctgcttggccaggtgcctctctctgtgatcagaaccatcacggaggcctgggcagaggacctctatgggaagtcagctcagggaagcattaattctgcctcagagaactggacgatgtttgacaaaaggaatgatatttgagctgggctttggaggtcaaagagtattctgcaaagcagtgagggagaggaaggcatgtcaagatcagggaacagtgtgtaccctggcgtggctagactgtacggagcgtgtgtaggggttggcaggggagaggtggcaaggagtactgggggttgagactggaacactgggtcagagccagttggaaggacttggcttaaatgccagacttgggctttatcctgcaggccacagagagccatcagtgtcacgggggaggttgagcttttaggagactacctggtttgaggagggactggatttggggaagaactggagtcagggagagacaggttaagaggccattgccatagttcaggcaaagaatgatgacctgaactagggcagaaacaaagggaatggagaggaatagccatgtctgagaaatgttttgagaacttggtgaccaaactggatatggaaggtgaggaagatacaggagagaaggggacaggatgaatagagaggacaacatctaaggtagggagcagtagcaggcttggtggggtggcaggagtagagaaaaggagttcaatgttgaccttaagcttaaagagtctataagataccccaggaaagacagatgttccagtgaacattggagtatggtttagagctcatgaaagatggtcaggactggagatttgaatctcattagcacaagggtgcaaactaaaggcttatagtatgttgtattatattgcccagaaagagcagacaggtcaagtgaagggaggagaatgaaatcctgtgccaaaccaacatttaggcacaagaggaaccagtgaggaggggagagggtggtaggaaccaatgccatttaatcttcatgaccacctagaaaggcaggaatcatctctgcattgtgctgagacctcagtgcttcacttgcctaaggtgctgtagctggagaaggtcggtgtttaaacttgagcccctcattcaactccaaagccactgcttcttccatcctactaggctgccaccctgagaggctgggaaagagcatgcagaggagtggagggaaaacaggaatggaggagtatgtggaagccaggggagggcagggtttcaaggagaagaggtcaacggtgccaaatgcctcagaggggtcaagtaggatgaggacggcaaagacacttttcatttttcaattgagaggcccctgtggcctttgggtggcagtttcagtgaagtggtgggagtggaagataaggcagtggggaccatggaggcttccttttcagtatccataggacttgccctgcaagcccacacatgcaaatgctatcctaacccaactctgctcacctcatagcctcttagcccatcagatgccagccaccctccccatcccaactccattcactctgcaacaatagcaatgaacattatggtgaaggtagggaccaccgtgctcaccagggaggatgtcagaggcagatgctcaaggtggtggaggcaggggtgttgtctccatcttattcctgttctgtccattacattgctgcagtgatcaatatttgacactaagaacctcatgtcctatatccaggtccctgtgcatttgagcaaattgtagcccctctctaagccttggtttcctcatgtgtaaaataaaggagttgttaaagggtccttccagctctgactgccttgaatcccatgaaatccaaaatcctaaaatatctcctaaataatcctaaagatttgaggcttctcttccaggggatcctcatgaacttgttactctgttatggatactttcctgcacttaagcaaactatctctctctaaccctctgaacataactcaacttgccattatctttcctcctcacccacccactcaaattcacacagacacacacaaatccccacctcacatacacacacatcccacacacacacatagacacacacaatccccaccccccacacacacatctcacacacacgcacacatacacaaatccccaccccacatacacacacacacacataccccacacacacacacacatcccacacacacacattccctctcacacacacacacaatccccaccccctcacacacacacaatccccacccacacacacacacacacatcctacacacacatacacacaccccacacacacacacatacacacacacacatacaccccaccccagccactcccctgcccacagacgcacacacacatgcccttatttcggttgggatctgccatccccagacatctcgctatctagctttctcttactttgggagaggaacaggagggggataaacccttaatactactttcctgttgtctcctctccttcccactaggtgatcatggtaaccggggatcaccctatcacagccaaggccattgccaaaggcgtgggcatcatatcagagggtaacgagactgtggaggacattgcagcccggctcaacattcccatgagtcaagtcaaccccaggtgaggcctctgcaggaagcccctgtgccctaatcaacacgtcctcttgcacagaaggcttgggtgtcccctgggagtatttggatagcatttctgggacctttataggccttacctctgacactattgtgactggttcctcagccctgagcttgtatccaggctgtgccactgaatacccatgtaaccttggagatgtcacattcccttcctgagcctccattttctcaccacaaaattaggatgccatctccactgctgtaggagtgggatgtgagtaaagaaactagcccagggcctagcaaactgcacttacaactgcgatgatcccatggtgaggatttagactcacattctcaaagagaaatgggggaagtgagtactgaggagaggagaactgaagcaacaggggaagcaggctcagcagggagcctgcaggctgcggtggtgaagagaggcagggggcaggaggggctggtacaggtgccaggggtcagctgtctctgtccccacccaccctccagagaagccaaggcatgcgtggtgcacggctctgacctgaaggacatgacatcggagcagctcgatgagatcctcaagaaccacacagagatcgtctttgctcgaacgtctccccagcagaagctcatcattgtggagggatgtcagaggcaggtgagcacagccacgggaggcagatgacaggcagggaccggggaggcagggacagggccaagacaagcatggagtgagaggcgaggagccaggcttgggaaggggtttcgtcctcaagtgtggccgtcttccctccagggagccattgtggccgtgacgggtgacggggtgaacgactcccctgcattgaagaaggctgacattggcattgccatgggcatctctggctctgacgtctctaagcaggcagccgacatgatcctgctggatgacaactttgcctccatcgtcacgggggtggaggagggtgaggaggctgcatgggttgggatggtttgcaggatactgaagccggcacctctgttccctgtccctttaccccagttgaagaatcattccacaactctaggcagcccagcccactttagcttcccttgaacacaaaatcttcctctcttgggaagacaggcagccatgcttcaggggctgggggtggggaagagtccctctgacctccctgatgccctcagaatctccccacaggccgcctgatctttgacaacttgaagaaatccatcgcctacaccctgaccagcaacatccccgagatcacccccttcctgctgttcatcattgccaacatccccctacctctgggcactgtgaccatcctttgcattgacctgggcacagatatggtgagcgcaggaggtggaggaggggacaggcaaggcaatcgtgatggcacagtggcagggaggagaggtgcactggggcagtggccccagctgtgggggttacaggagacaggcacaggcctggaagacaatggggtctgaatacacgcttttttaactgtgtcaacgatcgtcactgtcgaagatcaattgcttctgtcatctcctacgtcccttcaaatgccctccctgccccatttcctaccccacacaggtccctgccatctccttggcctatgaggcagctgagagtgatatcatgaagcggcagccacgaaactcccagacggacaagctggtgaatgagaggctcatcagcatggcctacggacagatcggtgcgccaagccccgggcctcgggagggaaccccaacagggttcttttcccagctttcagaggaatgagccccaagcaaaattccaggacagaggccagctacccaagggtcagggacctccatctctggccctgaggggctgtgccccttctgcttcctgctctgaccctgcccctgcctttggccctctacccacagggatgatccaggcactgggtggcttcttcacctactttgtgatcctggcagagaacggtttcctgccatcacggctactgggaatccgcctcgactgggatgaccggaccatgaatgatctggaggacagctatggacaggagtgggtgagtggtgctgtgtaaacacagcgcacatgtgtgaaggtacgggaagctgaatgcctggcaggagtggccagtggtggccaactgggactggggctaggggtggatcaggagaaaccatgctaccttctggtcctaccctttcctccgacactctcatctgtctctgcccaccctccctccagacctatgagcagcggaaggtggtggagttcacgtgccacacggcattctttgccagcatcgtggtggtgcagtgggctgacctcatcatctgcaagacccgccgcaactcagtcttccagcagggcatgaagtgagtgcccacccccatggcacctacccacccaggctctgggcacactcaccaacccacacaggccaagcttccaactcagccctggaccagagctgtaaggagggcatcagattttaatcttccatctgtatatccatagataggtttcatatagaagagagaagccatgcttcaggctcctaattttgcattttgttattgtctctctccacctttcttctctccttctctccctcccttctttcccccatctcctacttgagtgccacctgctcctatcctttgcccagccctaaatccagtgtcttctgtgcccacccctcccctggccttccgcaggcagtctagtttatagcacttgcactgtggttctggaggccacgtgctgccgagggtcgggttcagcgcttcttgcagtgtgagttccagcgtgccaggcactgtgctaagtgcctaacacattgtttagccccacgatagctctatgaggtgggtattactgtttacatttcatggataagaggccccaaacaggttaaatgatgtgcccaaggtcaccaagatggtaagggttcaccagatctgtctctaaaacccagccctggctactacccaacatttctgtgctcacaccatctggcactgtttggaactcagtaatgactgtgattctattatgggtggtggttgagcgctgaaggtttcatgctggttccttttattttctcctaccataaacaatggccacaattcctcacatgaggttgttacagtttcttagtttggggctggggagggtggggagaagaatgccaaagtgaagttaataacacttaagatccaagggagaataaagtgaaaagcctgttagataaataaaggtaacatgaaggaaggagattccagtaagctaaaaatactaatggaaaaaaaatgcaatttgaagagaacaaggagcagagagtctaagaaattgggtataattctggggcctgggacttgctatgcactgcagggatgacacacgaaggtgggaacatggccatagtggctgcatccagcccatcttagaggcaaatgggaaaaatggcaaatgaaaatcaggctgggtacagaggaagagtactaataccaccacaggcctcaccttaggtccctgggccactggggatcctcagagatgctatttgccttattttgaaaagctttatgaaaataaagcactcacctatgcgaaggcaaccaggcttactaatgtgtcattcttaggcaaaagccaagagcgcatatcatgaagtggtgatcggatgctgattcacagttctgtctggaagccatggatagttctaattaattttaaatggggaaatgtattcaatacttattcacaaatgtagcttgagagacaaacaattaaatgtggcctttacagaagaaaataaggaggtccttagtgagtgaaaatttggaaatcactggcttgaaccaaaaagaggtaccttgtgtaagaatacaaaagatggagtagccggggacagtggttcacacctgtaatcccagcactttgggaggctgagacaggagaatcaattgagcccaagagtttggtactagcctgggcacatggtgaaactctatctctacaaaaaatataaaaattagcagggcgtggtggcacacacctgtaattccagctactggagaggctgaggcaagagggtcacttgagcccaagaggtggaggttacagtgagctgtgatcgtccagcctgggcaacagagtgagactctgtctcaaaaaaaaaaagtggagtaataatgtgactgaacattttccatgtctgtcactgaacatttcagtgacagaacattgcagagcttttcacgtgttatctcccttaattttcccagcaaccctatgataaaaaggtaaaatctccatttgatagagaaggaacgtgaggctcagagaaattcaacattgcctgcaacccaaagctagtcaatggcagaactgggaatagacaccacctgtctgactgcagaaactgccctgagaacctccttattctatcctgcttttcaattctgataaagtgaacatatattaaccacttattatgcagtgatcccctttacattctctgaattaaatatctataatgaaaccaccaccaggaactgtgggagatgctgagacggtagaagacatacatgggccctgcactgaaggagctttcaagcatcttgctggggagacacactttcatgggccctgtgcctggagcaataacaagatcatgagacaggccccatgttgaccaccgtgtctccagtacagaacacgtcacccaacacctagaaacaattatttaatgaatgaatatacgtgcaatagacaacattcggacgtaaactcagtaagcagaaaaacaaataacatcttcctttggttacataaagcatgagaagaggctgttggaagaagacatgcgactatgtcgtttagaattctctctcctctttcccttgcaccccaggggtatcccaggatctctgcctccatgatcccccttcacctgccacctcctttctttgcctttcaggaacaagatcctgatttttgggctcctggaggagacggcgttggctgcctttctctcttactgcccaggcatgggtgtagccctccgcatgtacccgctcaagtgagtgtctctttcgggcggcctgagtagtcatacggggggccttcagccccctccaggatccaagttctgatcgctttgaatgctcctttatgtgacagccaccaagccaacctctgatgctgctgacactctcctccattgctttcagagtcacctggtggttctgcgccttcccctacagcctcctcatcttcatctatgatgaggtccgaaagctcatcctgcggcggtatcctggtggtaagcccctccacattccccccagcaaagtgcaagccccaccaccagctcctccctccaggaccacacgcagactccactcccactactggttcctgcttctgttcctcaacaccctcagatcctggggtcccaggtcccaggagccctgactctttcgaacctgttgtctctgccctcttcccatcagattctaaaccccgcctaactcacagttggtctccgaggccctccaccttccacctgaaaccacagaacatcagaattagaagggcctttccaggtcacctagtcccacgtccatattttacagatagaggaggctcagaggtgaatctgttcagggtcgtaaagcaaagaatagcaggactggtactagaacccaggcctcctgatccccactcatcaaccgacaagttattgtttttcctacaagcgttttttaatcacttagtagaggttaaaatatgatggcttacaaaccaaatactgtccaggaatactgtttggtttgacctgtgccatattttgtgtgtgtggggggaggagggtggattaattggtccgatatagaaaatttagggtctttcacataaaatctgaattcgacttctcctgaagatcagaagagctgttaatcccatgtccacatctctgcacagcaagaatggacagctgctcccttagactctcgttcgtcacctgaagaggccctgtgggcgtttgcattttcaccctcgacctattctgccccagcctccaatgtgctaaatacaagtctcccctaaaggcaggttcaccctcccttcctttaacctatggccccagctcactggacctccttctcctccctttcaccttcttttttttttttttttttttttttttttttgagacggagtctcgctctgtcgcccaaccaggagtgcagtgcagtggcacgatctcggctcactgcaagctccgcctcctgggttcaagcaattctcttgcctcagcctccagagtagctgggattgcaggcgcatgccactatgcccgactaattttttgtatttttagtacagacagggtttcactgggttagccaggagtcttgatctccgcctgcctcagcctcccagtatgctgggattacaggcatgagccactgcacccagcctccttccaccttcctaagccacttcccccagtgcccttcaccaggcttctccttccacctggcttcagcgacccaagcccctaggaaattgatctcttgcctccttttaagctcatgctgcaatctccactcccaatctctctaacaggctgggtggagaaggagacatactactgaccccattggaagaagaaccaggcatggaaagatggggagctctggaggtgttgtggggatggtgatggagagggatggaaataacgggtggcattgggtggcaacatttggggagagataatgaggcaactcagcaggctaagttgcggggtatataaattggggtgatgaccccatagacctaactgtgaacaatcagattagacactatgtgttagagtccccccgaccagatccttttccatcccactccactatgttgtctattttttctgaggaattaagggttaccccaccctgcccactcccatcccttcaaccccacttcctactgtaatagatcagcatccaaaagcaggaacccatctaaaccagaaggaagccctctcagatcaccccagcctcactccatttcccacttccacccccgttagcttcctgcaggactctatccctggcttccccttcagaccttgcaatcacaaaaggttcttctggtgagtgcaagagcctgagactggaaaaggtggacttgtctcccagtcgaggctggtaagggaccttcagggagagctgggcagacaggtgggagatggaggtagggctggctggaggaaggaaacaacaaaggaagtgaggtagtgccaatgacaggacatttgacatgagtctccagatagatgtcgtggactccagctctacgtcccacattttagaataccccaccagcagaacaaactcagatctcatcagggtagcagcagaggcaggaccagaaggcaatcaagagcttccagaaatgccacacttgtgtgccacagagttccccgctgacccttggttaggggtcctcttagtccacaaggtccggatgtcactcatgtacttaataacacttcaccttctgtaatactaagtcctcagagctccatgctgttctgaaagggatggccacaagttctttcccagcctcttccattccctttcttttcatgcccatcccgatgaacctgcatcattccccgacactgccaagccaaccctggaaaaggagttcgctggccattggctagaatcagggtggagaagttccctgaaccttcctgtctcccagggacatgtatgcttccagggacaagcttaggtcatgaacatggtcagaacctttggacaagaggaaaaatactaagagatttgctttttctgggtgcggtggctcatgcctgtaatcccagcactttgggaggccgaggcaggtggatcatgaggtcaggagttcgaggcgagcctggccaacatggtgaaaccctgtctctactaaaagtacaaaaaattagccagtcatggtggcacacgcctgtaatctcagctactcaggaggctgaggcaggagaattgcttgaacctgtgaggaagaggttgcagtgagctgagatcgtgccattacactccagcctgggcgaaagggtgagactccatctcaaaaaaaaaaaaaatgatttgcttttgacgtcttaggtggcagggctgttccctccaggcaaatgcccttcaaaccgacgatcattgtgcccacttaccctgggctggagagttggtttcaggttcctacaggagatagctttctttcccttactccctatctaacacttttgctctgcaggcagccttgcccattctctaagcctggcttagaaggcactgggaatgtcctgtagagagagacctagataggtcatgcaagtgagaaagacatctgaggaaaatggaagacctaaggcagacaggaaggaagcacaaaagacaagcattgggtcagacccataaaccacctcccaaaggctgtcatttcattgcactggaattttgctttatcagaagcaaggaagtaagggagtcattgccttgggcctgggaatctaagtgggagacaatattaatttggatccgattaattggagattactaactgtggacaaaagtttatctttgcacaatcaataaaaatggcatttttttagtaaattaagagcataaacaatattgctagaggtggcatgtttagtctaccaaaaacaatacttttcaggcactttagaaatatccttttagaagcagcgagtgcatgggctaattatcatcaatctttatgtatttgttaaagaaacatctacaggatctttattggtgaccttttgtaagacattagtttgaggtactacctatgtacttgaaaataataaagtggcatttctttatgaaaaaaaaagaaatctcttccataattcagatttctacactttatacttgcctccctcctaaatcgtgatattgaaatatgtgctgtggcagaactcggcttgtagggaaagcaacaaagagatagcaagtgtcagggatgggagggaaatggtctgggagcagatgatgtccgtggagaaagcaagaggggaagaagttaggttgcaaaataacctacaagaaactatagcaggagcctccttcctcatgctgatcccaccctaagagccacaagagtttgtccaggacagggaggggcctgtgagtctattaagaacaagatcctcaggggcacttctgctttttctgttccagaccaaaatcaggccattctctatctgatgggatgggggaaggagatagtgggttgaggagcccaagagtcaacaccaattcacaatctgtacttcatgcagagctttgtcctgggtgctctctttaaggggtgggggtaaagtggatgcaatccttgaaattcacctgagtagtagacatcagaaaccatcatggacagaatgtaatgagcagtaggggggacgcttgtgtgctggagatggaggggtgggtgggtgggtgtgcattgctccaggggggccctgggaatgggagagagaaagacaccaactcttacaacctatgccaggatttcagaataaaggtcagaagtcaattcttgcccaagccatattgcagcccctttattatgactcttaacagtgtcattaatgacagttatagttagtagtgattataagagccttaatcacagctcattttgtgccataactatgccaaaattttatttgtatagtctccgttcatcccaccacagggcctttattcttgatggtccctctgccaggaacacttttccctagttattcacatgcctggctttgtcacttcattcagatcactccttaaacatcagtaagatcctcacagaggacctcaaataaaatgacttcctggaacctctttctctgttctcttcatttttgttcataaatacttattaccttaaatttagatagaaagacagctagatgtaatatttagaaagatatacatgtattttgttgctgtttatgcttttgtttgtctgactcctccagtataagttccatgaagacagagactctatttcttttgttcaacacctttatccttagcacctaaaacatctgacacacgttagacaattaataaatatgtgttggatgactgaaaggatcctcacagtaattcagtaagatggagactattattatctccaatttacagatgagaaaactggtgctcagaaagttaaattattattcaaagtttcaaaggtagtaagcatctgaagcaggattcaaacctaggccagtctgactccagggcctgccctcttaaccatgccatgctctgcaactgcaagaacagaaagcctatgtgcatggacagagcctgactagcccaatggctcagtgaactggggaggctgccaagggagccaggaatttgtggacaattaacatttgagcagcaggggcaaggcagatccgtgagaaagggagaagatatgatctcaaagatgcggtagggggttaagaaaaagatccaggccaggcacagtggctaacgcctgtaatcccagcactttgagaagccaaggtgggcagatcacttgaggtcaggagttcgagaccatcctggccaacatggtgaaaccctgtcttccactaaaaatacaaaaattagccgggtatacacctgtaatcccagctactcaggaggctgaagtagaagaatggcttgaacccaggaggcagaggctgcagtgagccgagattgtgccactatactccagcctgggtgacagagcaagacttcatctcagaaaaaaaaaaaaaagaaagaaagaaaagaaaagaaagaaagaaaaagatccaaagagatttgatggtctgctagaggattttagcaaaaagaagaatcttactattgaatgtaatctgagaagctaaggccaacttttgacccaggcagaaagtctttccatggcattttctttttatctacagaataggaaatgtgatcatgcatcagagataatcagagatagtcactaaatattcataatgctaagaacgcagcaaaaaataggaagaaagtggttagatcaatatcaaaggaagacatttaatacaaagtgagtctttcaaaaatatccttggctccagtgaattcaatgaaggattttttgcaaattcctcaaagaatttccttatattatttaaaatgtgctggaatataaaaaattattttgtgttttgtgttgcccagcctattttatgagataagtactattttgttaaaattttatatttaatatagataataaattgactaccccaaatggtggaatgcaaggatagcatattacaaggaaaatgttacaaacaactaacattaactagacaaaggatgaaataatcatttcaaaaaaggttgaggaggctatcagtaaaattcagtatctattactgataaaaatgttggaggaaaaagtgtatcagaaaatataatcatgggccagtcgcggtggctcacgcctgtaatcctagcactttgggaggccgaggtaggtgggtcacctgaggtcaggagtttgagaccagcctggccaacgtagtgaaaccttgtctctactaaaaatgcaaaaatttgcgcgtggtggcacgcgcgcctgtaatcccaactactcgggtggctgaggaaggagaatcacttgaacccggaaggcataggttgcaatgagctgagatcccgccattgcacctccagtctggggtacaagagtgaaactcggtctcaaaaaaaaagaaaatgtaatcatgttcagagaagagaggaaaggatgtagtaagtctagaaaaccaataacagcaactataacaaataattgcaataaaacatttgaaatcctcgataagcagtttgtgtttaaaagttctacaaaggccgagcgcggtggctcacgtctgtaatcccagcactttgggaagctgaggtgggcggatctcttgaggtcaggagtttgagaccagcctggccaacatggtgaaaccccgtctctactaaaaatacaaaaaaaaaattagccaggcatggtggcgggtgcctgtaatcccagctacttgagatgctgaggtttgagaatcacttgaatccaggaggcagaggttgcaatgaaccgagatggtgccacagcaccccagcctgggcaacagagactccatctcaaaaaaaaaaagttctaaataagccaggtgctatggttcacgtctacaaccccagcactttgggaagctgacgcaggaggattgcttgagcccaggaatttgagaccagcctgggcaacacagtgagacctcatctctattaaaaaaaaaaaaaaaaaaattagcctggggtggtggcccacacctatggtcccagtcacttgggaggctgagggaggaggatcgcttgagtctgagaggttgaagctgcaatgagccatggttggaccactgcactccagcctgggtaacagagcaagactctgtttcaaaaaataaaaataaataaataaaaattctaaataaataaaactttgtttttagcgagcataactccctaaaaatccaagaaattcagccaaaacaaagcaacagcatcaataacaaaaaaaatcctagaagcaataaattcaaagttacagggtatatgggtatcagttttcaaagaagcaaatgtatccctaaatattagggagacagaaaatacagcataaagagcttctatttacaatagaatgaaaacaaattacgctcaaggtttactgtgtgcagcacatagtaactattaaagaaaatttaaaagtacaatgagaaaaataaaaaaacatgaattcatggaaagctaaacttgactgccatttgggaaggcagaacgtagtaaagataaaaataagttactatgaaagagtcaattcaatatcaattaaaatcctcgctgcatttttataaaacatgacatattggttgtgacattcagctgcaagagtaatcaggcaagaatctcagaggttttttctaagtaattatgaagcaaatgaatagatcactgatgctaacatatttaccccaacagattttaaaacacatcagaccactggccgggcgcggtggctcacgcctgtaatcccagcactttgggaggccaaggtcggcagatcaagaggtcgggagttcaagaccagcctggccaacatagtgaaaccctgtctttactaaaaatacaaaaattagccagacatggtggcgcatgtctgtagtcccagctactcaggaggctgaggcaggagaatcgcttgaacccggtaggtggaggttgcagtgagctgagattgcaccactgcactccagtttgggcaacagagtgagacttcatctcaaaaaaaaaaaaaaaatcagaccaaagtggcaattatcaaaaccttgtagcattaagataaaacctgaaaactcattagtcattcaacatctattcagggactatttgtggaccagctgccctgtgccaagcactatcctaggagccaggtatatagctgtggaaaaaaacagggaaggtccctagggtcatggagaaccagacaagtcaacaagacaagtcaatcagacaagtcaacagttaacaggcaggataatttcagagggagagaagtgttgtgaagatcaaaagtgatagagagagggctggcgccggaggggctgttttggatttaactatgagagaaggcctctccgaagaggtggacttttgagctaagatctctagaacaaaatgaggtttctaaaaataatttcaattgattgtatctccataaagttgcttttgggcaatgcccatctgcaagactgagctaagtgttattgtcacatagatgatgcatagaaaaacatatgaattttaactttaattctaaccttcttcttaagaattttatgttcatctacattaaacacaaagactgggagaaaacatttgtgttatatatgacaagggtttcctacaaatcaatataaaaaagaaaacaatggaaaattgggcaaattgtaagaatgacaatttacaaaataaataaataaagtccaagaccaggcatggtggctcatgcctgtaatcccagcactttgggatgcccaggcgggcggatcacccaaggtcaggagttcaagatcagcctggccaacatggcaaaaccccatctctactaaaaaatacaaaaaaatcagctgggtatggtggcgtgtgcctgtagtctcagctacttagaaggctgaggcacgagaatcgcttgaacacaggtggtggaggttgcagtgagctgagattgcaccgctgcactccagcctgtcaaaagaaagaaagagagaaagaaaggaaggaagaaaggaaagagagaaagaaagaaaagaagaaatgaaagaaagaaagaaaaccagaaagccagtaaacataagagaaaatgctcacattgacaatttaaaaatgcaaattaaaactacaagatatcaaagttcactgattataatagtaaaaatcaaggtcatctagcataatcaaaggtgtggaaggcagacattcttgcatcctgttgttgggatgcagatagataaacacttttaaagaccaattggcagaatcttttaagattgttaatgagtgtactctatgattcagcaacaggaactgattctacagaaatagaagctcaagggcctgatgatatctatgtgcaagaatgacactctagcaattttattaatggttaaaaaaatggaaaatatctcataaatccatcagtaatgggaatgattgaatagagcatggtcaatacagaatatggaagcctcacagcactgaaaaaaagaagctttatgtacatgacaggttggtagagagttgaatgattgtttaaaagttgaaaaatacctccttttagatatctatttgtataaacatagaaaaaagactggaaggacatgcagcacattgttaccagcagtaacttcagcagtggggagaatctgagtttggagggagggaaggtggggctttcaatttttatcttaaacatttttaatagagaagaaaaatccaatctgttaaagaaatagacgatcatttatcccagctgggaagggagcatttctatttctgaatattcaaggaggattgcatcagcaccaagatgaatgtttccagatacagtcatatttttaaaaagcatgcccaaccaaaatgcaattaaataaatatcaggccaggcttggtgtctcacttatgtaatcccaacattttaggaggccaaggccaaggattgcttgagcccaggagtttgagaccagcctgggcaacacaggggcaccccgtctttactaaaataaaataaaataaattagccgggcatggtggcacatgcctgtggtcccagctacttgggaggctgaggtgggaggatcacttggacctgggaggttgaggctggagtaagccataattgcaccattacactccagcctgggcaacaaagtgagatcctgtctcaaaaagtaaataaacaaatatcaaacaacagaatgggaaaatctatgtgacgtgcataattgaaaaatatatataatggttgacagaaaagtatagatgcttcagattattcttggaaggaggtagaatcctatggacatgcaaaacatatatacagttaatatagtcaaagcacttactgagacaccagagaaggtcaatggaagaggtaagtacatcattttaaaatgagaaaatgcaacgctatcacatggaaaagcatatttttaccctcactgagaagagctgcatattaatccacaaataaaactactactgaattcaagctacctattgagcacatactatatatgtcacatagtgctttttgtagagcacctcacttaaggtagaaggtatcctcttttaaaaataagaaaagagaggtacagaggttaggtaacttgctcaaagccacacagctgacaagtggaggagttgggattgaaatccaggactggttccagagcccaagatctgatctattctgctagctgatctcctaaaattaaaagatcaaacccaatgttagtggaaaagtgtgccttgctaaaaagcacacacagagtacctgcttttttttttttttgagatggagtctcaaaaacagacgggagaatattagtccaaactgcaactgcaccattttgtaagctccctgctatggttttttgtttgtttgtttgtttgtttgtttgtttgtttgtctgagatggagtcactctgtcaccgaggctggagtgcagtgatgcaatctcaattcactgcaacctctgccttctggattcagatgtttctcctgcctcagcctcccgagcagctgggattacaggtgcccaccaccacacctggctaaattttgtatttttagtagagatggggtttcaccatactggccacgaaggtctcgatctcagcctcccaaagtgctgggattacaggcatgagccaccgcgcccggccgaatacccgctttatttttgagtcatctatttggcatacctctaagcctccaaagtctgcaggaccacacaagaactttgttctagttctgccctcagactgaaactctttctgtagcagggcctgctccaatcgtcctcaaacccaaagactgagacttctaggttcttggttaaaaccttcatgaggcctttgcgacagcagacctggaccatcgccaaggcaagacttctggattcttggttagaactttcaggaggcctttgtgatgccagacctgggtcattgccccagcaaccacagggcctgggactggggggttcccagatccttgaagctcactccgcctcctcactctcactgcatttcccaccttcctgtgggccttgcggcatcttcatcactgaggcacctggttacgcttcacctcttgtttcctgccctcactgcattccctcacctctacctttttatccttccaccctaggcttctctcctccctcttccctcactcctgactcttcctcttcccagcggacggctggaggaccgctcagtctctcctctctcacttcccttcctctctctcaccttcaccacccaacacctccctccctgcctctttctttctgctccctcattctctccccaccactctcttctcgtggcccccttgcccgcgcgccctcttcccttccccttgcctcactctctcagctttcttcccacagttgagctcgggcagctctttctggggatagctatggggctttgggggaagaaagggacagtggctccccatgaccagagtccaagacgaagacctaaaaaagggcttatcaagaaaaaaatggtgaagagggaaaaacagaagcgcaatatggaggaactgaagaaggaagtggtcatggtgaggccacccaaagtgggcgctgacagctgccctctgaaaacactcctccacctatctttaacatcttaccttgagaatgaaacacacaggccagagccacatctcttctctgttaggctttggagggaaggagagggttaaaaaaaaaaaaaaagatacacacagagagacagggcagctcaacagcaagcacaggtatattgcagacacctgtggaagtgggggatcagcttaattccacagtccactgccacttacaggctgggtacttatagggatggatgggaggagtctgggctgtatggcctgctgcctggcaggatatcgataagatgttctcatgatgaggtgatttttggcccttgtttccacagaatataatcatggtattccctggacctttgcccagcaggatgtgatagggatgtttctttagtggggtctttgtctttaattgggccttcgtctgccctgtggtcaggtggttaggcaggctgtttctctggcccgaacccccgtgaaatgtttcactttgaccaaggcctgtaaaatagtggggagctaggccgggcgtggtggctcacacctgtaatcccagcactttgggaggctgaggcaggcagatcacctgaggtcaggagtttgagacaagcctggccaacatggtgaaaccccgcctctaaaaatacaaaaattagctggtcctggtgatgggcccctgtaatcccagctgcttgggaggctgaggcaggagaaacacctgttgggaggcagaggttgcagtgagtcgaaatcgcaccactgtacaccagcctgggcaacagagtgactccatctcaaaaaaagaattgcagggagcttacaaaatggagcagtctcagtttggactaacattctccagtctgtttctccccctctccctggaaatgacctgggccaccccctgtccctcaatgcctctactgtcccctcaggatgatcacaaattaaccttggaagagctgagcaccaagtactccgtggacctgacaaaggtgagtaagaagctccctgaggaggcagagagtctccaactctgactgtgaggctgccaggacaaaagctgaactaggaatccagccccctaacttcaagtccaacgttcccacccctcaccctctgcctggccacgttccatggacactacctggaaaaagctgcaaatggtaactaccctcaaagagagtgtgggactagataagagaataagaatgctttagggcagtgctggtcaaacgtcttgtccttaggtctcctttacactcttagaatttatctaggaccgcaaagaacttgtgcttatgtggcttaagtctgtctatatttaccatattagaaattaaaattgagagttttaaaatgtatttctcaattcatttaaaaataacaaaaataaagttatcatatattcatatatgttttgacaaataactgtatttttca

SEQ ID NO: 852 - DNA, 4716 bp, Homo sapiens
tctctgtctgccagggtctccgactgtcccagacgggctggtgtgggcttgggatcctcctggtgacctctcccgctaaggtccctcagccactctgccccaagatgggccgtggggctggccgtgagtactcacctgccgccaccacggcagagaatgggggcggcaagaagaaacagaaggagaaggaactggatgagctgaagaaggaggtggcaatggatgaccacaagctgtccttggatgagctgggccgcaaataccaagtggacctgtccaagggcctcaccaaccagcgggctcaggacgttctggctcgagatgggcccaacgccctcacaccacctcccacaacccctgagtgggtcaagttctgccgtcagcttttcggggggttctccatcctgctgtggattggggctatcctctgcttcctggcctacggcatccaggctgccatggaggatgaaccatccaacgacaatctatatctgggtgtggtgctggcagctgtggtcattgtcactggctgcttctcctactaccaggaggccaagagctccaagatcatggattccttcaagaacatggtacctcagcaagcccttgtgatccgggagggagagaagatgcagatcaacgcagaggaagtggtggtgggagacctggtggaggtgaagggtggagaccgcgtccctgctgacctccggatcatctcttctcatggctgtaaggtggataactcatccttaacaggagagtcggagccccagacccgctcccccgagttcacccatgagaaccccctggagacccgcaatatctgtttcttctccaccaactgtgttgaaggcactgccaggggcattgtgattgccacaggagaccggacggtgatgggccgcatagctactctcgcctcaggcctggaggttgggcggacacccatagcaatggagattgaacacttcatccagctgatcacaggggtcgctgtattcctgggggtctccttcttcgtgctctccctcatcctgggctacagctggctggaggcagtcatcttcctcatcggcatcatagtggccaacgtgcctgaggggcttctggccactgtcactgtgtgcctgaccctgacagccaagcgcatggcacggaagaactgcctggtgaagaacctggaggcggtggagacgctgggctccacgtccaccatctgctcggacaagacgggcaccctcacccagaaccgcatgaccgtcgcccacatgtggttcgacaaccaaatccatgaggctgacaccaccgaagatcagtctggggccacttttgacaaacgatcccctacgtggacggccctgtctcgaattgctggtctctgcaaccgcgccgtcttcaaggcaggacaggagaacatctccgtgtctaagcgggacacagctggtgatgcctctgagtcagctctgctcaagtgcattgagctctcctgtggctcagtgaggaaaatgagagacagaaaccccaaggtggcagagattcctttcaactctaccaacaagtaccagctgtctatccacgagcgagaagacagcccccagagccacgtgctggtgatgaagggggccccagagcgcattctggaccggtgctccaccatcctggtgcagggcaaggagatcccgctcgacaaggagatgcaagatgcctttcaaaatgcctacatggagctggggggacttggggagcgtgtgctgggattctgtcaactgaatctgccatctggaaagtttcctcggggcttcaaattcgacacggatgagctgaactttcccacggagaagctttgctttgtggggctcatgtctatgattgaccctccccgggctgctgtgccagatgctgtgggcaagtgccgaagcgcaggcatcaaggtgatcatggtaaccggggatcaccctatcacagccaaggccattgccaaaggcgtgggcatcatatcagagggtaacgagactgtggaggacattgcagcccggctcaacattcccatgagtcaagtcaaccccagagaagccaaggcatgcgtggtgcacggctctgacctgaaggacatgacatcggagcagctcgatgagatcctcaagaaccacacagagatcgtctttgctcgaacgtctccccagcagaagctcatcattgtggagggatgtcagaggcagggagccattgtggccgtgacgggtgacggggtgaacgactcccctgcattgaagaaggctgacattggcattgccatgggcatctctggctctgacgtctctaagcaggcagccgacatgatcctgctggatgacaactttgcctccatcgtcacgggggtggaggagggccgcctgatctttgacaacttgaagaaatccatcgcctacaccctgaccagcaacatccccgagatcacccccttcctgctgttcatcattgccaacatccccctacctctgggcactgtgaccatcctttgcattgacctgggcacagatatggtccctgccatctccttggcctatgaggcagctgagagtgatatcatgaagcggcagccacgaaactcccagacggacaagctggtgaatgagaggctcatcagcatggcctacggacagatcgggatgatccaggcactgggtggcttcttcacctactttgtgatcctggcagagaacggtttcctgccatcacggctactgggaatccgcctcgactgggatgaccggaccatgaatgatctggaggacagctatggacaggagtggacctatgagcagcggaaggtggtggagttcacgtgccacacggcattctttgccagcatcgtggtggtgcagtgggctgacctcatcatctgcaagacccgccgcaactcagtcttccagcagggcatgaagaacaagatcctgatttttgggctcctggaggagacggcgttggctgcctttctctcttactgcccaggcatgggtgtagccctccgcatgtacccgctcaaagtcacctggtggttctgcgccttcccctacagcctcctcatcttcatctatgatgaggtccgaaagctcatcctgcggcggtatcctggtggctgggtggagaaggagacatactactgaccccattggaagaagaaccaggcatggaaagatggggagctctggaggtgttgtggggatggtgatggagagggatggaaataacgggtggcattgggtggcaacatttggggagagataatgaggcaactcagcaggctaagttgcggggtatataaattggggtgatgaccccatagacctaactgtgaacaatcagattagacactatgtgttagagtccccccgaccagatccttttccatcccactccactatgttgtctattttttctgaggaattaagggttaccccaccctgcccactcccatcccttcaaccccacttcctactgtaatagatcagcatccaaaagcaggaacccatctaaaccagaaggaagccctctcagatcaccccagcctcactccatttcccacttccacccccgttagcttcctgcaggactctatccctggcttccccttcagaccttgcaatcacaaaaggttcttctggtgagtgcaagagcctgagactggaaaaggtggacttgtctcccagtcgaggctggtaagggaccttcagggagagctgggcagacaggtgggagatggaggtagggctggctggaggaaggaaacaacaaaggaagtgaggtagtgccaatgacaggacatttgacatgagtctccagatagatgtcgtggactccagctctacgtcccacattttagaataccccaccagcagaacaaactcagatctcatcagggtagcagcagaggcaggaccagaaggcaatcaagagcttccagaaatgccacacttgtgtgccacagagttccccgctgacccttggttaggggtcctcttagtccacaaggtccggatgtcactcatgtacttaataacacttcaccttctgtaatactaagtcctcagagctccatgctgttctgaaagggatggccacaagttctttcccagcctcttccattccctttcttttcatgcccatcccgatgaacctgcatcattccccgacactgccaagccaacccttcctgtctcccagggacatgtatgcttccagggacaagcttaggtcatgaacatggtcagaacctttggacaagaggaaaaatactaagagatttgctttttctgggtgcggtggctcatgcctgtaatcccagcactttgggaggccgaggcaggtggatcatgaggtcaggagttcgaggcgagcctggccaacatggtgaaaccctgtctctactaaaagtacaaaaaattagccagtcatggtggcacacgcctgtaatctcagctactcaggaggctgaggcaggagaattgcttgaacctgtgaggaagaggttgcagtgagctgagatcgtgccattacactccagcctgggcgaaagggtgagactccatctcaaaaaaaaaaaaaatgatttgcttttgacgtctccattctctaagcctggcttagaaggcactgggaatgtcctgtagagagagacctagataggtcatgcaagtgagaaagacatctgaggaa

SEQ ID NO: 853 - protein, 1014 aa, Homo sapiens
MGRGAGREYSPAATTAENGGGKKKQKEKELDELKKEVAMDDHKLSLDELGRKYQVDLSKGLTNQRAQDVLARDGPNALTPPPTTPEWVKFCRQLFGGFSILLWIGAILCFLAYGIQAAMEDEPSNDNLYLGVVLAAVVIVTGCFSYYQEAKSSKIMDSFKNMVPQQALVIREGEKMQINAEEVVVGDLVEVKGGDRVPADLRIISSHGCKVDNSSLTGESEPQTRSPEFTHENPLETRNICFFSTNCVEGTRIVIATGDRTVMGRIATLASGLEVGRTPIAMEIEHFIQLITGVAVFLGVSFFVLSLILGYSWLEAVIFLIGIIVANVPEGLLATVTVCLTLTAKRMARKNCLVKNLEAVETLGSTSTICSDKTGTLTQNRMTVAHMWFDNQIHEADTTEDQSGATFDKRSPTWTALSRIAGLCNRAVFKAGQENISVSKRDTAGDASESALLKCIELSCGSVRKMRDRNPKVAEIPFNSTNKYQLSIHEREDSPQSHVLVMKGAPERILDRCSTILVQGKEIPLDKEMQDAFQNAYMELGGLGERVLGFCQLNLPSGKFPRGFKFDTDELNFPTEKLCFVGLMSMIDPPRAAVPDAVGKCRSAGIKVIMVTGDHPITAKAIAKGVGIISEGNETVEDIAARLNIPMSQVNPREAKACVVHGSDLKDMTSEQLDEILKNHTEIVFARTSPQQKLIIVEGCQRQGAIVAVTGDGVNDSPALKKADIGIAMGISGSDVSKQAADMILLDDNFASIVTGVEEGRLIFDNLKKSIAYTLTSNIPEITPFLLFIIANIPLPLGTVTILCIDLGTDMVPAISLAYEAAESDIMKRQPRNSQTDKLVNERLISMAYGQIGMIQALGGFFTYFVILAENGFLPSRLLGIRLDWDDRTMNDLEDSYGQEWTYEQRKVVEFTCHTAFFASIVVVQWADLIICKTRRNSVFQQGMKNKILIFGLLEETAAFLSYCPGMGVRMYPLKVTWWFCAFPYSLLIFIYDEVRKLILRRYPGGWVEKETYY

SEQ ID NO: 854 - DNA, 5477 bp, Homo sapiens
tctctgtctgccagggtctccgactgtcccagacgggctggtgtgggcttgggatcctcctggtgacctctcccgctaaggtccctcagccactctgccccaagatgggccgtggggctggccgtgagtactcacctgccgccaccacggcagagaatgggggcggcaagaagaaacagaaggagaaggaactggatgagctgaagaaggaggtggcaatggatgaccacaagctgtccttggatgagctgggccgcaaataccaagtggacctgtccaagggcctcaccaaccagcgggctcaggacgttctggctcgagatgggcccaacgccctcacaccacctcccacaacccctgagtgggtcaagttctgccgtcagcttttcggggggttctccatcctgctgtggattggggctatcctctgcttcctggcctacggcatccaggctgccatggaggatgaaccatccaacgacaatctatatctgggtgtggtgctggcagctgtggtcattgtcactggctgcttctcctactaccaggaggccaagagctccaagatcatggattccttcaagaacatggtacctcagcaagcccttgtgatccgggagggagagaagatgcagatcaacgcagaggaagtggtggtgggagacctggtggaggtgaagggtggagaccgcgtccctgctgacctccggatcatctcttctcatggctgtaaggtggataactcatccttaacaggagagtcggagccccagacccgctcccccgagttcacccatgagaaccccctggagacccgcaatatctgtttcttctccaccaactgtgttgaaggcactgccaggggcattgtgattgccacaggagaccggacggtgatgggccgcatagctactctcgcctcaggcctggaggttgggcggacacccatagcaatggagattgaacacttcatccagctgatcacaggggtcgctgtattcctgggggtctccttcttcgtgctctccctcatcctgggctacagctggctggaggcagtcatcttcctcatcggcatcatagtggccaacgtgcctgaggggcttctggccactgtcactgtgtgcctgaccctgacagccaagcgcatggcacggaagaactgcctggtgaagaacctggaggcggtggagacgctgggctccacgtccaccatctgctcggacaagacgggcaccctcacccagaaccgcatgaccgtcgcccacatgtggttcgacaaccaaatccatgaggctgacaccaccgaagatcagtctggggccacttttgacaaacgatcccctacgtggacggccctgtctcgaattgctggtctctgcaaccgcgccgtcttcaaggcaggacaggagaacatctccgtgtctaaggtaggggctggtgatgcctctgagtcagctctgctcaagtgcattgagctctcctgtggctcagtgaggaaaatgagagacagaaaccccaaggtggcagagattcctttcaactctaccaacaagtaccagctgtctatccacgagcgagaagacagcccccagagccacgtgctggtgatgaagggggccccagagcgcattctggaccggtgctccaccatcctggtgcagggcaaggagatcccgctcgacaaggagatgcaagatgcctttcaaaatgcctacatggagctggggggacttggggagcgtgtgctgggattctgtcaactgaatctgccatctggaaagtttcctcggggcttcaaattcgacacggatgagctgaactttcccacggagaagctttgctttgtggggctcatgtctatgattgaccctccccgggctgctgtgccagatgctgtgggcaagtgccgaagcgcaggcatcaaggtgatcatggtaaccggggatcaccctatcacagccaaggccattgccaaaggcgtgggcatcatatcagagggggtcagctgtctctgtccccacccaccctccagagaagccaaggcatgcgtggtgcacggctctgacctgaaggacatgacatcggagcagctcgatgagatcctcaagaaccacacagagatcgtctttgctcgaacgtctccccagcagaagctcatcattgtggagggatgtcagaggcagggagccattgtggccgtgacgggtgacggggtgaacgactcccctgcattgaagaaggctgacattggcattgccatgggcatctctggctctgacgtctctaagcaggcagccgacatgatcctgctggatgacaactttgcctccatcgtcacgggggtggaggagggccgcctgatctttgacaacttgaagaaatccatcgcctacaccctgaccagcaacatccccgagatcacccccttcctgctgttcatcattgccaacatccccctacctctgggcactgtgaccatcctttgcattgacctgggcacagatatggtccctgccatctccttggcctatgaggcagctgagagtgatatcatgaagcggcagccacgaaactcccagacggacaagctggtgaatgagaggctcatcagcatggcctacggacagatcgggatgatccaggcactgggtggcttcttcacctactttgtgatcctggcagagaacggtttcctgccatcacggctactgggaatccgcctcgactgggatgaccggaccatgaatgatctggaggacagctatggacaggagtggacctatgagcagcggaaggtggtggagttcacgtgccacacggcattctttgccagcatcgtggtggtgcagtgggctgacctcatcatctgcaagacccgccgcaactcagtcttccagcagggcatgaagaacaagatcctgatttttgggctcctggaggagacggcgttggctgcctttctctcttactgcccaggcatgggtgtagccctccgcatgtacccgctcaaagtcacctggtggttctgcgccttcccctacagcctcctcatcttcatctatgatgaggtccgaaagctcatcctgcggcggtatcctggtggctgggtggagaaggagacatactactgaccccattggaagaagaaccaggcatggaaagatggggagctctggaggtgttgtggggatggtgatggagagggatggaaataacgggtggcattgggtggcaacatttggggagagataatgaggcaactcagcaggctaagttgcggggtatataaattggggtgatgaccccatagacctaactgtgaacaatcagattagacactatgtgttagagtccccccgaccagatccttttccatcccactccactatgttgtctattttttctgaggaattaagggttaccccaccctgcccactcccatcccttcaaccccacttcctactgtaatagatcagcatccaaaagcaggaacccatctaaaccagaaggaagccctctcagatcaccccagcctcactccatttcccacttccacccccgttagcttcctgcaggactctatccctggcttccccttcagaccttgcaatcacaaaaggttcttctggtgagtgcaagagcctgagactggaaaaggtggacttgtctcccagtcgaggctggtaagggaccttcagggagagctgggcagacaggtgggagatggaggtagggctggctggaggaaggaaacaacaaaggaagtgaggtagtgccaatgacaggacatttgacatgagtctccagatagatgtcgtggactccagctctacgtcccacattttagaataccccaccagcagaacaaactcagatctcatcagggtagcagcagaggcaggaccagaaggcaatcaagagcttccagaaatgccacacttgtgtgccacagagttccccgctgacccttggttaggggtcctcttagtccacaaggtccggatgtcactcatgtacttaataacacttcaccttctgtaatactaagtcctcagagctccatgctgttctgaaagggatggccacaagttctttcccagcctcttccattccctttcttttcatgcccatcccgatgaacctgcatcattccccgacactgccaagccaaccctggaaaaggagttcgctggccattggctagaatcagggtggagaagttccctgaaccttcctgtctcccagggacatgtatgcttccagggacaagcttaggtcatgaacatggtcagaacctttggacaagaggaaaaatactaagagatttgctttttctgggtgcggtggctcatgcctgtaatcccagcactttgggaggccgaggcaggtggatcatgaggtcaggagttcgaggcgagcctggccaacatggtgaaaccctgtctctactaaaagtacaaaaaattagccagtcatggtggcacacgcctgtaatctcagctactcaggaggctgaggcaggagaattgcttgaacctgtgaggaagaggttgcagtgagctgagatcgtgccattacactccagcctgggcgaaagggtgagactccatctcaaaaaaaaaaaaaatgatttgcttttgacgtcttaggtggcagggctgttccctccaggcaaatgcccttcaaaccgacgatcattgtgcccacttaccctgggctggagagttggtttcaggttcctacaggagatagctttctttcccttactccctatctaacacttttgctctgcaggcagccttgcccattctctaagcctggcttagaaggcactgggaatgtcctgtagagagagacctagataggtcatgcaagtgagaaagacatctgaggaaaatggaagacctaaggcagacaggaaggaagcacaaaagacaagcattgggtcagacccataaaccacctcccaaaggctgtcatttcattgcactggaattttgctttatcagaagcaaggaagtaagggagtcattgccttgggcctgggaatctaagtgggagacaatattaatttggatccgattaattggagattactaactgtggacaaaagtttatctttgcacaatcaataaaaatggcatttttttagtaaattaagagcataaacaatattgctagaggtggcatgtttagtctaccaaaaacaatacttttcaggcactttagaaatatccttttagaagcagcgagtgcatgggctaattatcatcaatctttatgtatttgttaaagaaacatctacaggatctttattggtgaccttttgtaagacattagtttgaggtactacctatgtacttgaaaataataaagtggcatttctttatgaaaaaaaaagaaatctcttccataattcagatttctacactttatacttgcctccctcctaaatcgtgatattgaaatatgtg

SEQ ID NO: 855 - protein, 1003 aa, Homo sapiens
MGRGAGREYSPAATTAENGGGKKKQKEKELDELKKEVAMDDHKLSLDELGRKYQVDLSKGLTNQRAQDVLARDGPNALTPPPTTPEWVKFCRQLFGGFSILLWIGAILCFLAYGIQAAMEDEPSNDNLYLGVVLAAVVIVTGCFSYYQEAKSSKIMDSFKNMVPQQALVIREGEKMQINAEEVVVGDLVEVKGGDRVPADLRIISSHGCKVDNSSLTGESEPQTRSPEFTHENPLETRNICFFSTNCVEGTRIVIATGDRTVMGRIATLASGLEVGRTPIAMEIEHFIQLITGVAVFLGVSFFVLSLILGYSWLEAVIFLIGIIVANVPEGLLATVTVCLTLTAKRMARKNCLVKNLEAVETLGSTSTICSDKTGTLTQNRMTVAHMWFDNQIHEADTTEDQSGATFDKRSPTWTALSRIAGLCNRAVFKAGQENISVSKVGAGDASESALLKCIELSCGSVRKMRDRNPKVAEIPFNSTNKYQLSIHEREDSPQSHVLVMKGAPERILDRCSTILVQGKEIPLDKEMQDAFQNAYMELGGLGERVLGFCQLNLPSGKFPRGFKFDTDELNFPTEKLCFVGLMSMIDPPRAAVPDAVGKCRSAGIKVIMVTGDHPITAKAIAKGVGIISEGVSCLCPHPPSREAKACVVHGSDLKDMTSEQLDEILKNHTEIVFARTSPQQKLIIVEGCQRQGAIVAVTGDGVNDSPALKKADIGIAMGISGSDVSKQAADMILLDDNFASIVTGVEEGRLIFDNLKKSIAYTLTSNIPEITPFLLFIIANIPLPLGTVTILCIDLGTDMVPAISLAYEAAESDIMKRQPRNSQTDKLVNERLISMAYGQIGMIQALGGFFTYFVILAENGFLPSRLLGIRLDWDDRTMNDLEDSYGQEWTYEQRKVVEFTCHTAFFASIVVVQWADLIICKTRRNSVFQQGMKNKILIFGLLEETAAFLSYCPGMGVRMYPLKVTWWFCAFPYSLLIFIYDEVRKLILRRYPGGWVEKETYY

SEQ ID NO: 856 - DNA, 5510 bp, Homo sapiens
tctctgtctgccagggtctccgactgtcccagacgggctggtgtgggcttgggatcctcctggtgacctctcccgctaaggtccctcagccactctgccccaagatgggccgtggggctggccgtgagtactcacctgccgccaccacggcagagaatgggggcggcaagaagaaacagaaggagaaggaactggatgagctgaagaaggaggtggcaatggatgaccacaagctgtccttggatgagctgggccgcaaataccaagtggacctgtccaagggcctcaccaaccagcgggctcaggacgttctggctcgagatgggcccaacgccctcacaccacctcccacaacccctgagtgggtcaagttctgccgtcagcttttcggggggttctccatcctgctgtggattggggctatcctctgcttcctggcctacggcatccaggctgccatggaggatgaaccatccaacgacaatctatatctgggtgtggtgctggcagctgtggtcattgtcactggctgcttctcctactaccaggaggccaagagctccaagatcatggattccttcaagaacatggtacctcagcaagcccttgtgatccgggagggagagaagatgcagatcaacgcagaggaagtggtggtgggagacctggtggaggtgaagggtggagaccgcgtccctgctgacctccggatcatctcttctcatggctgtaaggtggataactcatccttaacaggagagtcggagccccagacccgctcccccgagttcacccatgagaaccccctggagacccgcaatatctgtttcttctccaccaactgtgttgaaggcactgccaggggcattgtgattgccacaggagaccggacggtgatgggccgcatagctactctcgcctcaggcctggaggttgggcggacacccatagcaatggagattgaacacttcatccagctgatcacaggggtcgctgtattcctgggggtctccttcttcgtgctctccctcatcctgggctacagctggctggaggcagtcatcttcctcatcggcatcatagtggccaacgtgcctgaggggcttctggccactgtcactgtgtgcctgaccctgacagccaagcgcatggcacggaagaactgcctggtgaagaacctggaggcggtggagacgctgggctccacgtccaccatctgctcggacaagacgggcaccctcacccagaaccgcatgaccgtcgcccacatgtggttcgacaaccaaatccatgaggctgacaccaccgaagatcagtctggggccacttttgacaaacgatcccctacgtggacggccctgtctcgaattgctggtctctgcaaccgcgccgtcttcaaggcaggacaggagaacatctccgtgtctaagcgggacacagctggtgatgcctctgagtcagctctgctcaagtgcattgagctctcctgtggctcagtgaggaaaatgagagacagaaaccccaaggtggcagagattcctttcaactctaccaacaagtaccagctgtctatccacgagcgagaagacagcccccagagccacgtgctggtgatgaagggggccccagagcgcattctggaccggtgctccaccatcctggtgcagggcaaggagatcccgctcgacaaggagatgcaagatgcctttcaaaatgcctacatggagctggggggacttggggagcgtgtgctgggattctgtcaactgaatctgccatctggaaagtttcctcggggcttcaaattcgacacggatgagctgaactttcccacggagaagctttgctttgtggggctcatgtctatgattgaccctccccgggctgctgtgccagatgctgtgggcaagtgccgaagcgcaggcatcaaggtgatcatggtaaccggggatcaccctatcacagccaaggccattgccaaaggcgtgggcatcatatcagagggtaacgagactgtggaggacattgcagcccggctcaacattcccatgagtcaagtcaaccccagagaagccaaggcatgcgtggtgcacggctctgacctgaaggacatgacatcggagcagctcgatgagatcctcaagaaccacacagagatcgtctttgctcgaacgtctccccagcagaagctcatcattgtggagggatgtcagaggcagggagccattgtggccgtgacgggtgacggggtgaacgactcccctgcattgaagaaggctgacattggcattgccatgggcatctctggctctgacgtctctaagcaggcagccgacatgatcctgctggatgacaactttgcctccatcgtcacgggggtggaggagggccgcctgatctttgacaacttgaagaaatccatcgcctacaccctgaccagcaacatccccgagatcacccccttcctgctgttcatcattgccaacatccccctacctctgggcactgtgaccatcctttgcattgacctgggcacagatatggtccctgccatctccttggcctatgaggcagctgagagtgatatcatgaagcggcagccacgaaactcccagacggacaagctggtgaatgagaggctcatcagcatggcctacggacagatcgggatgatccaggcactgggtggcttcttcacctactttgtgatcctggcagagaacggtttcctgccatcacggctactgggaatccgcctcgactgggatgaccggaccatgaatgatctggaggacagctatggacaggagtggacctatgagcagcggaaggtggtggagttcacgtgccacacggcattctttgccagcatcgtggtggtgcagtgggctgacctcatcatctgcaagacccgccgcaactcagtcttccagcagggcatgaagaacaagatcctgatttttgggctcctggaggagacggcgttggctgcctttctctcttactgcccaggcatgggtgtagccctccgcatgtacccgctcaaagtcacctggtggttctgcgccttcccctacagcctcctcatcttcatctatgatgaggtccgaaagctcatcctgcggcggtatcctggtggctgggtggagaaggagacatactactgaccccattggaagaagaaccaggcatggaaagatggggagctctggaggtgttgtggggatggtgatggagagggatggaaataacgggtggcattgggtggcaacatttggggagagataatgaggcaactcagcaggctaagttgcggggtatataaattggggtgatgaccccatagacctaactgtgaacaatcagattagacactatgtgttagagtccccccgaccagatccttttccatcccactccactatgttgtctattttttctgaggaattaagggttaccccaccctgcccactcccatcccttcaaccccacttcctactgtaatagatcagcatccaaaagcaggaacccatctaaaccagaaggaagccctctcagatcaccccagcctcactccatttcccacttccacccccgttagcttcctgcaggactctatccctggcttccccttcagaccttgcaatcacaaaaggttcttctggtgagtgcaagagcctgagactggaaaaggtggacttgtctcccagtcgaggctggtaagggaccttcagggagagctgggcagacaggtgggagatggaggtagggctggctggaggaaggaaacaacaaaggaagtgaggtagtgccaatgacaggacatttgacatgagtctccagatagatgtcgtggactccagctctacgtcccacattttagaataccccaccagcagaacaaactcagatctcatcagggtagcagcagaggcaggaccagaaggcaatcaagagcttccagaaatgccacacttgtgtgccacagagttccccgctgacccttggttaggggtcctcttagtccacaaggtccggatgtcactcatgtacttaataacacttcaccttctgtaatactaagtcctcagagctccatgctgttctgaaagggatggccacaagttctttcccagcctcttccattccctttcttttcatgcccatcccgatgaacctgcatcattccccgacactgccaagccaaccctggaaaaggagttcgctggccattggctagaatcagggtggagaagttccctgaaccttcctgtctcccagggacatgtatgcttccagggacaagcttaggtcatgaacatggtcagaacctttggacaagaggaaaaatactaagagatttgctttttctgggtgcggtggctcatgcctgtaatcccagcactttgggaggccgaggcaggtggatcatgaggtcaggagttcgaggcgagcctggccaacatggtgaaaccctgtctctactaaaagtacaaaaaattagccagtcatggtggcacacgcctgtaatctcagctactcaggaggctgaggcaggagaattgcttgaacctgtgaggaagaggttgcagtgagctgagatcgtgccattacactccagcctgggcgaaagggtgagactccatctcaaaaaaaaaaaaaatgatttgcttttgacgtcttaggtggcagggctgttccctccaggcaaatgcccttcaaaccgacgatcattgtgcccacttaccctgggctggagagttggtttcaggttcctacaggagatagctttctttcccttactccctatctaacacttttgctctgcaggcagccttgcccattctctaagcctggcttagaaggcactgggaatgtcctgtagagagagacctagataggtcatgcaagtgagaaagacatctgaggaaaatggaagacctaaggcagacaggaaggaagcacaaaagacaagcattgggtcagacccataaaccacctcccaaaggctgtcatttcattgcactggaattttgctttatcagaagcaaggaagtaagggagtcattgccttgggcctgggaatctaagtgggagacaatattaatttggatccgattaattggagattactaactgtggacaaaagtttatctttgcacaatcaataaaaatggcatttttttagtaaattaagagcataaacaatattgctagaggtggcatgtttagtctaccaaaaacaatacttttcaggcactttagaaatatccttttagaagcagcgagtgcatgggctaattatcatcaatctttatgtatttgttaaagaaacatctacaggatctttattggtgaccttttgtaagacattagtttgaggtactacctatgtacttgaaaataataaagtggcatttctttatgaaaaaaaaagaaatctcttccataattcagatttctacactttatacttgcctccctcctaaatcgtgatattgaaatatgtg

SEQ ID NO: 857 - protein, 1014 aa, Homo sapiens; identical to SEQ ID NO: 853

SEQ ID NO: 858 - DNA, 91278 bp, Mus musculus
  misc_feature (1)...(91278): n = A,T,C or G
aagtatcttgatcctaataaatagagttcctggttaaggcagatgttactaagaattgactgagagaaagctggacatctgagtatgaaataaattcagatcatggagctgatctgcagttttcttgtcaaggtctgaaataaaatgatcaggtcaaagccattttgaaactgaaatttctcacgtcaactaatggtcactcattgccaggctcatggggtgatgtcagaggcattgtattgtgattggggaggtggggggcatgcacaaggaaaatcacaggcctcgggatcccagcttagacaagtggtcaggatggctccaagagacaaggagctggactgtgtctgttaaagacatcaaagttacaaatacagaatgacatgaaagaaccaggtttactctgcagcaaatgtttctctggtgggtaattcccatacagaagatcttttgatgttgttgtttacaagtcagagtaccatctcaacttcaagcaatgtcctcagcctattaaaccctctcatctctccctttgttggcttcttttgtgaaaaataaggaattcccctacttgaagttaagatccatttagaaattctgtctgcgaaagattattaaatgacattttgaaatctgaaaaaattttctactaaatacagttctcttcttaatagaagcctggtgctgtggatagtctggaaggagagtctactgtgagatagaaaaatttaatctcacccctaccttcaggcttttagattataaatagttgatgggactcaaagctacagaaattgtcattcacaacagcatggaccccatgataaggattcacttcagtagagccaattaaatttcattagacttaataaaagtgtgtttcaccctcttgtgagactattgttacttaactggatggttaaagtggaattcaagggctttatagatacttccacttcacccatttaaacatatcatgagtcttgtggaagtgacagttgtataagattatgatttcagattcccacaattcccattatgccttgttttgtctattgcaaggtggttcatggctctgtgacttggctatacctgctagccttaaagaattcttcaaagctcagaatccttaaagtacagccattactttattaattgtggagattttagtcagttttactagaacccattcacaattattgtcatcagtacatgttactatgtctcaagagtaagaaaaatatccatccttctgaaaaatattgaaatatgattttgttctgatacttatacttgaatttggatagatcagtgagcctagaaattattttaaataaaacctttaactctgaaaatatgacttacttggttctagaagggcattctatctgattttcttccttctgcctcatgtcttactgttatgcaattatggatatgataagtcctgagctaggaagagtggccatcaatatctactaaagatagggaaagactaaagagctagaatttccatagtttccttaatttatgagagaaaaatttaagtctgaagccagctaagtcagaagttaaagtagatttcctttatcaacctataaagacaatacatcaggggttatttcatgattatttagagcaaagtctttctctggtggcttcaggtcctgatacatggatagcatccatctaagcacacaggaaaaggacagtaaacaatgagtagaaagtggaaagaccaaccagccctggagtctcatttggtcagtttttaacagttcacctcttcaaacctctgcctctttaagactccacatgcagtagttgtgaaccacagacccttctgcccattcacagtgactgctcagggcaactccactctcctcctgccccagcgctttctgcctagctcctgggcttcagctttgcctctggtcttgtacttcaacttcgtagttgaatggattgatattggtttcatgaattgcaagaggttcttattcctgtttggcctcacttctgtattgagacctgaaacttgccactactttgatgtctatttctctggataggtcagtccagtccttttgagggatactgtgaggagcaggaatataccagcagtcagttaacatcatgtaagccattgtctcacctaaataatgtagataattgtatttacagttttctttctagcagttgaagttagtgttgctgtgtgagccactgagggtgctcctttatataaggacagcacttcttgctatccagacacatttttcagtgctgtattgtattgttttcatactctttatcttttttattattttatcattattttgtttgtttgttttacttttccatttttggtatgtttggggctttttttttttttgagagagagagacagagacagagacagagagatacacaaacatagagagacagagacagggacagaggaagaggaagagaaaacatgttgggtaggtgaggaggtagggaggacggaggaggagttgatgaaaaggaaagagtaggataaaatatattgtatgaaaaaactttaagaaaatataaattatacgaaaagcatcaactaagattgactaaattcacagagcaatagaagcctgcagtttacagttccgctattgagctccagctgcactgcagacttctggcatgaatttgtgatctctgcttcctggagaatcagtggtactctctgagccgcaggcagatgccagcgtgttgatacaaagccatcagtgcttctcacccttttgacctggctcctctgcttccgttctatgttctcatgttatctcacattatgtctgtctgtatgtatgtctgtctgtgtttgaacagggggagaacatgtgcatgtattcatgcacacttgtatgtgcatgtatatgacagccagagatcaaccaggcaagactcccttgattgttttcctttgcattctttgacacaaggtctctccctaaacttggagctccttgattcagcttggctgacagggagtttcctgtctctcaaccttagtcccactactggacttacagacacagccatgtttgacttttatgtgggttctgggaagccaaactcagggtcatatgctgacagccatctccacagccccaacatttccttttattaagagttcagtcaggcagtggtgatacacacctttaatccaagcacttggcaggcagaggcaaaaggatcactgagtttaaggcaagcctggtctatttctgagagagagagagagagagagagagagagagagagagagagagagagagagattatcaaatccacagacttctcagtctttctatgatgacttaacattcagtcatctctaggagaactttccatgttctctgattttaagctttatccaagtctgtaattctgtggctttaaaaatgttcttggttttattgttattgttgttttgtgagacttgccctaagatctatttgtgcaagttactagtctagattttatttttgcagtactcacttatgtatgagaagaacaaatttcaggttaagcctaaaatgaaaatcacatcagcactttcaaaacagcttcatgtagtcttggctggcacgttgtggtctgtattgttctctatgtcccatacagagccctgtgggatttcaagcttcgctactgtgcacttcatagttatttcggtgcagattaggaaaatgtgcctataaactataaactataaaattttttgtaataaccaatttacattttgatcattcacaagaggacatatacatgtgtgcacacagggaaatgaatcctgggagacgcaattgagaaacactgggtaaagtactgtccaacagccctgggagggcaggttaaccattttgattctgcatacatgtgagtcagtacagcagatagacagaagacagagatggatagagataacaaggggtatagacatagacgacgataggaaatagatacttttgtatttgtatatgaaaactttaaaactatatgtgccgttctatactgaagatttcccagatccccgtttaacccagaaagctgtagatttccatgtaaatcataaacagggtaaatatcattagtaatgttccctatattttactaatctaaaatataatgattttcccaaagtttttcctggatttgaagcatcttgggaaactagcattctgagttatttctcttgtttcccactactgtcccttgaaagctgaggcctctgtcccagtttacattcttgctatcttctgcttctgatactttggtccctggtgtgttcttatctctttcatcttgtcagcaagaactcatctgagtaagactccagtttggtctggcaaaaaggaagaaaatgaaagaggaaaggaagtttatttagggttaaactgaatgcttcctgacaacactactgtatcttatttgatgctaaccatgtatctgctgggttaggccctttgaaattactttctggtttcaaactcacatatcctgtttttctaagtactcgtgtgttaggctatgtccttgatatttgtgtgtgtgcaaagtctttaggatatatgtaaataaattcttgttgtatcgtatcattttatctgcaaacaattctcttatactttttctccactccctcttctaaaactcctataagctttgttttcagccaaggtcatatgtacagagtcctgagataaagacactattgcacaaaatacattttcatggtctctgccctctgatagcaaaagaggggaatactgtgagcagtgtcttgtgaactgttggcatcttacatgaaccagttgttaaatcattccagtgcataaatccaatcttccaggtcagattacttatgagataaaacgttgtcacataataaccatgtgctctgagacaggaatggccttacacaaggtcctttatacactgtaacaagagaagcaattgtttctgcatgtgaactcaagcatgaaacagacttggtttaagtagttatcaagtatcaagcagtttctagactttaaattttgaaaaaaaagtggttaaaaaatgaaattgatgaaaactacccatctactataaacaagttgctctgaacatattagctagaagaaatttctcctactattaaatgtattgtctgtaccttcttgcctggcatccagcagttccttgtttggggtcattacttgataagaggaaaaaatattggctatgtttgaactgtgcaaaaagttagtttgaatgagacctcccatggaagtcattaagacaagaacttaataggagtttgagttgattcatgggaggaacaactagaagtatcagaggtagaaagtataatgatgatgtaacaccagaaaaaatatatctttaaatatttatcagggtaccagaaagtgaaaaattgaaaaggggaaatatttattatttactcttggagtcctttattgaaattcacaagtgccctctgtcctttatcattccatcttgttatctctcactaacacatagctaatgctctagacatttgctgaactactgaataaataaacagaaaatatgcacagaaacagcacctaacactgctgttaagatagaagactggcacttcttgcttcttgttggcaactttactactgtggggaacaaagttccacattgtgattccacaagagtgctccttaaacccacacttggacacacaagtcattgtggggaaggagatatattccaaggatagattataggaaggcagagagatgataaaattttcccttatgcacatgttattattttatagtaattgaaaacatataataaaagacagcttaagacactacttgctagcagtgtcttgctaaatgtgccaacaataacttagacttgactgtaaaacatagccagcatcacccaaaaagacttcttgccctagcctgcaatgttctacttcctctctgcaagttgtttttgttttccattatctcagccacctagactaaaagtaacagtgccttccactttacccttctctgttacactacatcactgcagcaacacacacacgcacacactcacacatgcacacacacacacacatgcacacatgcacatacatgcacacgcacacgcacacacacatgcacacacgcatacacatgcacactcacacacgcacacactcacacacacacacaccaaatgtacttcatccactctttcattttccctatctcacatgtagggctcagaattgatttttaggtccaaattacttgtatgttgtcactacctatactcagcccatcttacatgacagtccctttggaccacattacactgttccccaaaacaaacacattatttttctgttataaagcgcttgaggctaggatttgcttttatacatttcaagtcccttccactatgaattagtgatgctcacgtaagagacaccagcagagatacccgttgggtgcctactacaggccagcagcagctgtgtggctggaacagcagtagcagctccagtttcttttcattctagcaaaggcacagggaaaatgaaatgtgagagtccaatagaaagtgaacagaacagggaggctttacattggatgggaagaaaaaaaaatctctttagcaagggagaaagagagaaaaccaggagggaagaagggaagaggaagggaaagaaaaaaaacatgcgaagtcagagaatggctgtgtgcccaggtagagtgtcaagacagtcaaagacccggaggatgatggaagggccttggggaacttcaggaattagggagcagagatggcctaagtgaatggggtccaaggaagagggacaggtttgggatagtctgggactacatcacaaggatgaaaacgagtcatcaagggagagtgccactgaggaaagagaacattaatttgggagtttataaagcagttccaaagccttaacgcttgaggcttgtatgtgactatcctctgaacctagcaactgccaccttgtggaggtcagcttgtccctcttgcaaactgattatcccaaatggacctgttgactgtttaaacaacacatggagaagtgaggagggtcggagaccctgagtatccagctgctccctaccacctggtgtatgaaagcctgtttgagttgctatcctttgaaggaggggctgaattaagtaatctccaaaagactgggagtgggtctccattgatgcctctacaaggaacccttcagtctgctggttttccaggtgtggtgtgttgggaaagagaacccacatattagtaagtaactctcacttatgcttcggaagaaacacaaccaacatatagattcctgtgctgggtatgtcaacttgactcaacctacagtcacctgagaggaagaaatctcaattgacaaattgcttccataagatgtgggctgtaggcaagcaagcaagccggtaggactttttaaatgttttttttttctttttcatgtaatgatagagtgtgggacagtccaacccactgtgggtggtaccacctccaccctgggctggtgttcttaggcaccataagaaagccagttaagtgagctaccagaagcaagacagtgggttctccatcagctcctgcctccaagttcctgcccagtttgagttcctgttttggtttccccttatgaagtatgattcaggatatctaaggcaaataaatcctttcctcccccaggttgcttttgatcatggtgctttgtcacagcaataggaaccctaactaagacagttccccagaggaaaggaatttcagagtcatgcctgggtttgccaatgggacgttagcacaaggggtagacattgtttctatctccccaatgggaggggatttttagcagcagggctgttttcaagtcctaagggaaggaaggagggttgtcttggcttgttgaataatacttctggaaaagtagcaaattgtaatctgaatgatagaaatgaggacctgcccattagccactgtacagctatcagtgccaaccagagtttcaccatcccttccctgcctgtggggctcaggaggcacgtgctattttatttttcagtccctcaaccaggctgaccggctcctccctcgtgcctcttctcagagtgtgtggagcccaactcagcgatccttgccttccagctctcttcaagtgttcccaaacaattaaactttatgnnnnnnnnnnnnnnnnnnnnnnnnnnnnnnnnnnnnnnnnnnnnnnnnnnnnnnnnnnnnnnnnnnnnnnnnnnnnnnnnnnnnnnnnnnnnnnnnnnnnnnnnnnnnnnnnnnnnnnnnnnnnttcccaaacaattaaactttatgggagtagggaacttttcttttctactatcaggccaaaaatgttgctgggtgctcctccaggcatcctgctgatttgttgtggtgtttcgaggactgggggctgcccactgcatgagatgatctgactcagtgaacagcgacagctgcgggcctgtgattctgttggtgtaactggcagacacggactttctttctttctttctttctttctttctttcttcctttcttccttcctttctctctctctctctctctctctctctctctctctctctctctctctctttcttcctttctttctttctctccctccctccctctctctttttctttctttctttctttctttctttctttctttctttctttctttctttctttctttctttcttgtcatttgtcttttttttgcaacaaaggtaagagggccagcatctcacctgctaacactcaccagcacttgcctcctgctccagcgtgaaaagcagggaatggaatatggagtgtaagacataaattaaaaataaaataaaattaaaaaaaaaaagaaaagcagcacacaaggagtatgttcagcagaggcccatctcctggcttaggtgtgctgtgactctgatctctggtggctttttagaagcctgttatgaccttgtcttaggctgtgtctacacatctggtggtaggtatgtcctggggtaactgagtgtgtacatggggactagttatgaagaagtgagcaaggggtggagtctgctaagtgaggcaagtcacagaatttccttagcttgcctgggttttctgtgttaggctattgcctggcttgctcatgcgtatagactctatttaagaggaagtgtatagagaggaaggaagcctgcataaaaggctgcaggcctgggagttttgaagagactagccatatacttttgtcaccaaatgctccaatagggctggggcgggagggggggggggcagcagttttggcttcttgcaaactgtgtaatttctgtatgctacacagcacataagtgacagaggaagttctggaaggttctccacagtcttagttcccaaattattggccactgggactggccctggaggccagtcacttggtgaagtcccgcaaggcatcaagccttagccaactttcaaaagggaatcccctgatctgttttgtgttcccccaagggttatttttgctgggccccagaagccagagccactgtgtgtgatgtctgccagggtgtgagtccatgcaacctaggtcccctagcgccccctacagctgctgcggggcggggatggggatcgggttggggagagggaggccaggctgtgagccactgcaccacacccaggaccccacccagatcctaggagcacccggcccctggctccggggccacagaaacggggcgtgggccagagcctgaagcatccctggccactacgatcgctccgcctgtggccaccaattcccctcctcttctggcgtccctctctccgcccctgtcgcctgccagcaccggacacgctgctgcacttcatctcttggggcgctcttctctttggccaaccgtcgcatcctgtgcaactctggtcagtggccgttttgtgttgaatgttctccaccaagagcgcatggctgcggaagcgaggtgcagaccgaggtcccgagggatcgccctccgggaagcggtgatgctgttgttgtacttcggggtgccaaccgggcactcctacaacctggacccggagaatgcactgctgtaccagggcccctccggcacgctgtttggctactcggtggtgctgcacagccacgggtcgaagcgctggtgagtgcgccctccccaagaggcatgtcacagcgcctccgcctctgggattccttgtatgaatcaaactttccgccctcctgggaggtcagagaaagacctggcttcagccagctgcctcactggagagccttggaactaacttatcttgggatggcagcccccagggtgctcctgagtcctgggtctccagtcatgggaagaggaggtgggtgccacttcccttgctgaccactgcacagctgtcacaagccaacacggggcagagtgggtgggcagactggttcacgtctgagcgaacttgcatggttcttgctttaggctcatcgtgggggctcccactgccagctggctctctaatgcctcagtggtcaatcctggggcgatttacagatgcgggatcagaaagaatccaaaccagacctgcgaacagctccagctgggtgagttgggtccccaaaacaagacataatgaactttctccccttcgtgggtccactgttgggcaagtcctggaagacactatgatgctggtctcttctggattaaagtacaagcttttcaattttaaccccatgccagcttgctcctgagagtattttcctctcctttgcttgcaactgtatgtgatctcagtatcttccaaacctctttcaggggaagtctcatagggtggcttctggcaagctaccttctaccagtcctagaactcttccatgtgtaaaatctgtttcaaagccttaaaacccctctctggctgaggacccaacttctcaactttgttctagcgtgagctgcacatcaggaatagaaactttgattgagcctatatcccaccatgtagcctatatcccaccatgtagcttatatcccaccatgtagcttatatcccaccatgtagcctatatctcaccatttagcctatatcccaccatgtagcccagggatttttcttccccttcctttaaaaatgacactacctaccataaaagaatgggaagaaaaaaacagcatgccttttgttaaaatcataaatataggaggtctgacatataattactaattttcctcccctcaaattctcctgtaaagcaggtctgtctttcagccctcgtttctgtctttatttaggttttcagcaacttgagaaatgtgcgctgacggcagaggagacaagtttcatgtttcaaagtcaaaagcaaagttgctgcgcacagacacatggggaaagaaaggggaactaatattaatttaggtctatcttgctctcagtactgttaagcatggctgtgtatattgctcaatgttttcccctcacagcagctctagtgtatgcttgtactgcttctgcttcctcagggctcccacacagagagctgcaggttccttcttcaaaagtacttacctagactcagggttatcacttcaggtatacatcttcagtgaggataaaaactaaatgaagggttttggtgtactgtctggagatatgatccattatcgatgatgatgagctaagggtgagaattgctactttttatatttatctgtaagtggaaggtctacttgagaatacctgactttgtcataaaccttttctattcgttgtcattgtttgtttgcttggtttttgtttgtttgttttttttttttctgtttcttttctttgcacttttaccccagcacccataagaatgaaggagttatgtgtacactggattaagctacagctgacactaaagtacaaaggattctgggagtaggaaagcacagggagaggcgaaggaggagaaggaggaagagggggaggggagggaagacaaaggggaaggggagagaacaacaaaacaaattttacttagaaaaaaaaaccctactatgaaacttgattctttataaaagagggatgggcctctgagcatcattaggcatcccctcttccaaggggcagacctgggctcatagaagactcacagacttgtgcattcagaatggttacttaaaaaaaaaaaaaggtattttcattacctgagagagttgtgtaatgagtgaagccttgatctgacagcagttcctcaaagggtctcaggaaagagcagcttcttcttctatgggcctggcattctttctgtgacattagaaactctggtggctacatcctgcctggaggatacgccatctatttctggatgtttgtatttaactgaaaggggatcatgtcctgacatattatataaacttttagatgtcagcaactgtcaattaaaggaaaacctaagttcactgggggtgcggagcacagaattcactacagaggcatttgagtacagtggttacttaagagatatgaagttctgggatggctgaataaggggaaagcacaagttttatcgtcatcaacttgtttgctgggtcaaaattcagccatggtaagccaaagcaacatttttttaccttcaagatttgagtcaacaacaaaaatactgagatgaaagagatcacaaatgagtctgaggtcccagtcagttgaatggctactgtctcagctatgggaacactcagaagagttttgtaaggagcatgcctgaacttacttctcagagaagactctgaacaatacattctcagtttctacggagaaaatggttcctttattaagaacaaattcaaaagtaatttaaatctagaaggtaaaatactgacgctaatgtccagaaagaaagctaaaagatcaccagttgattagcagaaacatattaagattgcaaagtttgtagactaagcatcactacttataaacatattttgtgtatgtgtgtttgtgaagaaagaaatgagggagaaagttatctatatatacacgaagtcttctgtatgttctgagtgatattatttatataattaattataatgatatattgtcttatctataatgtggttgattatattctaaagttcaaacgttcttagcctatccaggaatggtgccacatatctttaaccctagcactcaggaggcagaggcaggtagaactctctgagttcagttccagatcggtctggtccatatagcaagttccaagaaagccagacctaagttataccctgtctcaacccctgccccactcgcaccccaaatacttagctcagtatcaaatacgtaccagctattcaaaaattagctgttctttatttatctttttaagactatatgtgacgtctgcagtaaaatgttatcaaaataagtaattagggtcaattcataaactaagtaaaaaatgttaattatataaacaaaaatataacaaatttaaatgaaacaaaataagaatgaagtcattggtccatgaaaatggttatactaaggtagagctattggcagtaagtaacctcttgcctctggaagaactttactttttatcatggtttataaagtgcccagtcatttaaactgtccattggctcttcagttccaaatagtcatcttcggttgtttccaagtctctctagtaggtcagataaagggctggatccaatagattcctgtgctctcccaccctagtgtaacctatggctaatgctaacacatactatgctgtattcactataaccataatcagagttgagcaggagacaggagtactcatttatctagcatgctcaggggagatattggcagtaccctttcagtagaacgaattggtggctgaggtgaccaaggggttgtttaagcaaccctgagggtgttttcttcctgtgttctcagcctccctctggcaccctgcctgcctctgttgtttttcggtttcttgctacttccttccatgaacaaaaaagtagtctcccctcaggagcatgtaagtctacgcctacttgtggagatagtgtctaaggggctccaggtgatttgcagtttaccctcttctctgtcggctactctgtaccttcactaggagttgtttaatgagtttatttggtcactgatagttttagagtcaggatgataaaaatgccaactccatgagtacatttttaagcatgatctctgcttgaaatgccagtattcaacaaagcagaacacaacaccacatcaatgatacaaaatgtatgtggttatcaagacactctagactaaaaaaaaaaaaaagacatttattttctgtgagtacactatccctctcttcagactcttgagaagagggcatcagatcccattacagatagttgtgagtcaccaaggggttgctgggaattaaactcagtacctctggaagacagtcagtgctcttaaccactgagccatctctccagcctgacactctgggtgtttaatagtttatagttaccaaaatagaatagctctctgctctcttctctctccattttctcactctccttgccctcactctcccttcccttccccctccctctttccttctcctcccttagtctctctctctctctgggtgtgtgtgtgtgtgtgtgtgtgtgtgtgtgtgtttgtgtgtgtgtgtagacaaagagaaagagaggtactacagctcttaatgactgtctttatgggcaatagaatttaaagttgcccagttatatagttcaatagattagtcactggccacgtgtggcttctgagacaaggaatgcccatagtaagaagctctatctaagacagttcaaaactaagctatgattacctcataaaaaatatcttaaactagtattaataacctacatacttttttgaattgattgaacatttctttttgcttttgtcatatgacaacccttcagttaaaaatgagtgttgaatgcactttacatttctactgaacagcactaactccctacaacttcattttggtgggggctctcctgtatctgtgcctgagtgagtatgaccctcacttcttttacagatgcagagctctggccactctattaagcttcctgcctggacttctttttctcttcctggaaagaccaatggtccatagcaactaggtcaccattaatggttttgaatgtatttctggaaacattgccttaggaaaatctcctgtttttatatttcatactctatttgggaaggggtcgagtttctaagtattgcatcatttctgcctgattggcaagagtttgtaatactaaaatacaaacacttaactgttaaagtttcaaatatatttttgtaatattcatttgtttgcaattagcttaaaattgtagcttatgaaaccgaggttaataaagatggtcaatttgaaaaaccatcctcaaatacaggctaccctgaacacagaaaatcatgatagaggacgccattaatcaactcccaggttaaatggcagaagctgggtttgggcaagtgacttagtcgttaaagatatgaatcaccctggtagaggactcaagttcaatttcagcatccacaccaagcagcttacaactacctgtgaagccagctcatatgtgtgtgtgtgtgtgtgtgtgtgtgtgtgtattatatatatatatatatatatatatatattaaaataaaaatgagtattttaaaaggagagaagttctccaatctccctaattagagagatgaagctttcttaatacatttctttttaatataagatcagatgctcactggttaatatttctaatgactaagacacttttcttttgtgaaaggtttggggccaggtattagtagtcaattgtgcataaggctttatgtattcatctagtcattagctaagggatgtctaaggaccagacctaaatgcacaaaatcctttgtacagcagttttcccaatcatgtgttcattattgtacaaaactgtgttggaaagatcaaatgacaagaacaaagtattgaggaactgagagccatgtggggacagagtaagtctcaggtagagaaagagattgtaaaaataatacaccattgagggtgtgaccacagtgaggttcccatgctccaatggattggctccatagccttgcacttattggcagcctactggacttggtggattattagagaagagtaggggcagaaggtggaggaaataatgaaatgaggagaaggaggtattgggggaaatggagctacatctggtgatagttcatcacatacatgtacaaaattctcaaagaataaagaaagaaaaaacatgccagacagatcaaacatttgccatggaaagctaaggacattgagagcacagtacattggaagaactgaaaactgtgtaggattgtgctgcagggagctgtgaatgggggattacagagattatctctggaactcattgtggctatgaacagatcctatgatgtgaatcatagggaagttatgtcttcagattatatatttaacacatagtaatggtatgatgagtacttcggaatcaatgagtcaagattaagaatagtataacaaatatagacaaattctgctactggagataagttcctaactaggacagtagcaggttgtgcagaagtttagaggatagattcagaaacagtactttttgaataagtaacagggtcaagaagaaatgatcaaagatatagttaatggtggtgtgtacaccaaaggggtagaacagcaggtattctgggaaagccttgtatttcattggtatgaaatctacttctacagaaaaatagacatctatgagttagatgtctacttgtaatgacagagagaagtccgttccagtaagtcagagtcaagattgattgccatagagggcacagtcaaagccatatggatgaatgagcttaatctgcaagctgtagggaagagaatcagaagaccaaggatagaaacgaggctttctacaattagaaaagggcctagaatagggttactcaattccatttcaaacttaaaccatgagtgtttaagaataccagttccagtggccctgtattgaattaagtctctagaagtctgtccaagaaaggaaggagtttccagaggtccaaggatgatttcaaggtttatatgtggttggggaccactggggaagataggaagggactcataaagagagagccaagaaggcagaaagaaaatcatgtgcacctggcatcggggaagtcagaggataagagggtttagaaaaagggcaagtgactggaggtgtgaaaagaccctagacatcccaaagataagaactcaggtagtttcgctgagttagagaaaaatctgctcatcaataaccttgggaagaccttaaatgtaatcttaaatgtaatcttaactggtggacactgtaaagtctagaatgagagcaagcgataataatccttcctacttgctcttccttaaaccctttggcctgctgtgtctaataaataaagttaaaataataatatattatatataaaataataataaaataagactgaaaacctcagtgaactcagtctagatgataagagacgcaggataagtgattcattaatgattttagatatacattggcagggacaaatgtcaggtacatctgataggctttctggaatggggggaactgaggagtaagctggttttctttggtttgatgatcacacaggaagaactcaatatgaaccaaatgaatggagttagtgggattttacaggctttgttgccaatctcagctttcccccaatgagactgcattagcagtaggttggaagcgattgccttaaaaagcacaaagtttcataaatagctcctttgtggggaatcagaacattgagctgagtttataagtgacaggaccgggctcagtaatatccatgtttcttttgatgtccttagtttatatctacctttttcaattatgagcattctttttcaattttcaaacactgtaattcataatgaatatgttcagaaagaatacagcatacctatattcagacacctttatttgggagggtggctacttccatgaagtgaattagctatattcttttcaaattacaccttggactagagagaggtctcagtccttgatggctaggctccaatcacagctgatatatagaaaacacgtcagcttacaacatctgtgaaactttggtagcaggactttactcttggctcaggcactattttcctatgaatgttttctactggacgttgtatctgataacttctgtgtgccagtcatcgtttctgcaatgctttagtctacctagcctctcaccttcctgcagagaaatgcctcctgatatctttaattcctcaccctggtgtgtgccttcactggcagggacaatgtggcaagccctcactgagttcccttaaaccttcctatcttcctgaccatctatagtttctttttttctctatttattttacctgtgaactgtaaaataggagcataacattttcaacattggttactctagttttaaatgcaagcatgtttcttcagattaattttctatttagaattttgaattatcttgcttgtgtgagtaaaggcacttgttgtgttgactaacaggaggtagagacaggataaccagctgaaggctcctgggacagcatttgcatttgtagacacacacacacacacacacacacacacacacacacacacacacgcacgcacacatgcacacatgcacagatacaggcacatacaaataaatacataaaaaatttaattattcaactttccataagttttccaaatgaatctttaaatctaagaaactacctgaaaactatgaaagtagattttttttcctttattattttctaatgttggagacaaatgtcactaaattttatcactaaattattttaaaagtagatttagtacagaattggattgttaggaatgccaacatttgaatagctgacctggagagctggttgcttgtgttgaccatttctttccagctccatgcacccactaggagttagttgtatgtcctttaacaagtggtcggtctccctttgttaaaggcacttcatatttgatgttgacttttatgataatgcctacttcaagaatacttagaaaaaaataattaatacatgtgtttacagctattaaatctatgctggtacaaaaaaagatgtagtaaacaagaaagttatttttaccaaatatacctattggagtacattttctcttatagctcttacaaggagttgtatgagttttctagaggattttgaagaaacttgcgactaaaagacctgtagagacccagatcatagaatgaggtctccacaagtcaccttgttttctacagttctgaagctttagaataattcaggatcaagtcacatctatgaagtttcacgcctacatcatggtgctagtaattgtgatgtgaaacatttagaatagaatagtatagaattagaagagaacaaaattagaatagggatgggatggcatggcatggcatggcatagcatagaatagagtagtgaagaattagaggacttcaatatctggctttatacttttttgtggattataattttttttcatacatattgatcatgcttgctagccaatatcagattttgctagccatcctaagatcacatttaaagacctcttcttaactgaaggaaaacatttgatagtgttttatcattttgacatttaattttatcttttcattcttgcttggctctagatttgcaggaggttggacatttggtgcttttcctgtcctgtgccaccttcaaaatgccagagctatggtttccatttctcttcatcatttgtcaatataaattgctattgagttcccacatcactgctatcttttagaaagatcaccaccatgtttaattagatgtgtgagaaaaccgcatgttttaatcatagaatgtatgatataatgaatggattaacagtacttatggtctagtagaacaaactaaatgtaagggccatttgggttagagctgaagactgttgctgaatctcatggcactgtgggcgccccctggtgtctaaattgaaaccagcagaatgcacgttccgtgagtggaagcatttgtcatttattgaacacctactaagcactaggaagccttgtacacacaggcataagttcccataatctccaactttatgtactggtgcattttataagctgttaatttatctgtcactttagttccaggtgatttcttttcttttttttttttttttgaactcagcaagcagaatatatatatgtatgtagtgtgtgtgtgtgtgtgtgtgtgtgtgtgtgtgtgtatgtgtgtgggtgggtatatatgtgtgtgtatatataatgtttaaatattaaatatgcttggatatatgttagataatggaatttttattattttcactcagcagttattacttcctttaaaaagttaccttaaattagtggctctgtagaacataggacaaagcaggagttgttcatcttctatgattaattaagaaagtagaatgggagccaggcatggtggcgcatgcctttaatcccagcactcagaaggcagaggcaggcagatttctgagttcgaggccagcctggtctacaaagtgagttccaggacagccagggctacacggagaaaccctgtctcgaaaaaaaaaaaaaaaaagtagaatgggcaagttttaaatgtatgtttatcttgcaatagaatagaacttcaaatttaaaaggcaaaagtaacatataaaggaagggcttttgttatttttctgaaaccggaaagcatgccaggagtgcttgaaggagcagatgaacttttttacagtccagaaagtcagcctgagtgcccctaccacatgtctgctagggaatccacagaagagtgacgcaggtgagcaaaccacacacaccatttcaccaaaaagtcccagccttccccagtgcaaagcacatcactcaagtcctcaaaggtctagaaagaggactgacctttccgttgggtccttatttcttcagtggaaatgccccaatactgaagaaggtgcctaacagggagggaagggccagggcaggacaggggttaagaaatggagaatcttcatgaacaatacaaagttgacttttcatgagttgtgtgatgaatttcaggccagcttgagttacagtgagaccctaacgtttaaaaaagctgattttacaatctgggcagatttgttatattttacacactctcagatggaaaaacagacttaggatgtaaaattgaattcagttaattcacatagctgaatatttgtagagttctatggtagatgttttagaattgtgggaagcaacttaaatatcaatttttaaaaattgtaatcttttgatttattggcttcatagatttgggcaggttcttgacttagtttaagactcagtgactcagttttggaggctggtaagatgtcagatgacaaagtgttttctgtgcaagcatgaggctctgagaccaacccccagcatcatgtgaaagccagacatggtaacaaacctctgatctcagcactggggaggtggcgacagggtccccggatatcactggccagccagtccagctaaatagatgaactctgggttttgtgagggattctacctcaaaaaccacagcagagagcaactgaaacacctcctgtgttgacctctaaatacacataagcattaaccaacgtgcacacacctgtaaacacaatttttcacattcacatgaatcaattttcctatgactaaaaggattaataatgcattcttctggctttactgtgacaataaaacagtgttcacgttgaggcttcccataaagtgatggctacatatacaagaggattctgctatgatctacatgcatcttagtgtttaaccaaatccttaagatatattgacaataccatcatctaatgttcacatatgtcctatatcctgttcttgcccaaatacatcacacttgtcttgttctgtatgggaacaacacagatcctaactgacttaaccattttaagtcatgctcctcccagacacacatggaaaaatctgcaatttcaatctgctatttcctccattctatttgttactacgtcttaaagctcagggaaatagtattgtgaaagaaaatcagggggcacagaaacagagtgactctttcttccatcccagtctggtgaaaacattatggtcttttgtcatatctaatgaggaatttttatggtggcataatgtatttcaaaatccctcttcacaactgtgtatcaagtaccttcctgctatctgagcagcagtgttctacgctgcctgagtgctactgtcaaaacacaaccagtctctcctccttgaggagatgtagaagattgtatatctagcactccattgtccagctagagtgtgcagtgaacagcaaaacaaaaggggaagaggtgtgtttaagaagagtacccagttagctttgtactagcaacttatttttgaccattaagaattttaagtttcacttacatatgctggtagaaatcattagtttgagatttaaaactaacacgcacacacacatatcctattttcttcttcaatttgaaaaaaataagactgggcttaattcttggactaagaaggatggtttttaatatttttttccttaatttgtactggggaaatgcagtcaactgtgccacaaattagccattctagtgcaaaagagtggaaaaacatcagatgctaatttctgctgacctcttttgttttcaaccatgtaaaatactttttcaatcatggaactgagatttgatttgctaaaagtttagcttggtaatgtataagctgacttgaaaatgggaatataaatcactgcagcatgacattgggtaaaataaaatatggatttctttttttatggtcttgtcaaggacattcaggaaaattagctttcttgtgacagtctttgcaaatgtcacctctgtcaaaatgaatatcaaatttcttcatgaagaaaatatgtttagtatttaattgcctactctcattacctagctgaaacccaacaggacagatcttttattactattttgaaagcaatctaagtttcccagtaattagacaggaaagggcctgcccatctacattgttgaaacagttgttcttaaacccagcttcacccccaaatacagtcatctgggagatatttttgaatgctgatggcctggtctccccacaacccatcagccttgggtttgagtactcgtggtgggggaggggcacgggaggtagttggtatttgtttaaaattctcctgggtgatctcaagaccattcaactccttcacacggaacagtagatttacaagcacagaggctgagggaaggaactctcaacggtctaagaaaagcataagatggggccatcttgactcttctgctgagatttttctggcattcccaaagagaagagaaagtgttccagaaatcaaggaagttccagaactggagtggtgacttgcagactattcctggaactaattttgcctagtaacacatactgaaagcctctctgtattgtggttgaagttgaggattgtctcagtgggaagcaatgtcaagaagcaaaaagaagaaataatcacaatgtgtagatgtgtgggtgtgagtgtgtatgaagggaggatgtgtgtatacataagtgtatgcctgttaaaataattcctcacaattttattattttatgaattttctttatggcttcatagtcgtacttttgacccattttgaatcaagacatgtaacacaaatagaagactgattattgttttccatttatgaagttcaatttttagcacatatttctgggttttgggttgggatgggatgatggctaataagatttgggtttggccacaatgaagatgaataaggtctgtgctgaaccatagaagcagagcagaacggctgcaaacaaatgtatgcagctaatcccagtcaaaacaaagtcctccttcctactggttactattcatcatcgtttcttcccagcgatcacagcctataccattaagagctcttgacttctaaggttgagtcttttctgtaaagtagataagtgatatacattatatcgtttaatatatacacacactatgtaaatatatatatatatttaaattaccacaaatcagaggcctataaattagacagtatctgttgttgataccacataataacacatgtgaaagactgtgtctagtctgacttaaccccagcctccacatgccccattcaagagcaacttagcctcaccacttgaatcctgagaaagtctgagcatttttcatgtcaaaataaacacctcttcttgtggcttctggagggctcgttgttctgtttctaagaatcattgctttaaccagagaactaagagtagggacttgggcaacacaggaaataaagcctagagccttacaggctctcagagaagtcattctaaacaagccaggtcgttcagaagtccttctgaaggactcagaaaaaaaccagaaatggagagatatgtgctgaaatgataagaaaggggcacagagaacaggaaggctaggcagtaacagcagtaactgtcttctgcagggctaactctactgtgcaggaagcagcttggataaaacagataacagcttaacttggcaaaggtgtctctaatgttcatttaaaaacgtagggaacagctcagctaagaaacacataattgcatgcaggatgctattcttgcacatatgaacttctgggccattttcagctagcaaatttgcacgctatcatttgcatggttccaaagcatcgtgtttgttgttttttaacgtctggtgactaactagagaagagaacatttgtttgcaaatatcaaacctgatcttgaagaaaacacccatttttcatccccatgcaaacagggaaggtggcgttcggaggaccacgcactcttgtctttaacaatgacaactgcaggtggattggctggtgttgactataattttaaaaatagttttgtattttcgattatatggcatttattgttatagtaacagagcttcaactgcacatagcctggctgcctttggtggtgcgtttttgacattaattttaaaatattggtggttttaaagacaattccaactgaaaactgcatcccaatgaaaattaaatcctttggcctccccttcttacttctcctgtattggtttggaatcatgtagccctagtagctccctgtgttaggctaacactgttggttgaatgcttctcagcaattagagtgaagtttattggaactggaagatggtagctgagagctcacaaaatggagtgtataatggaacattataaaacaggttctgttttcctggacttccttcctttcctcttctttctccagcctttccttctctcatcattctcacataggaagctctgtgtacatcaagactactctctatcagggtttggaccacagcgaactgttcttcctgttgcttagcagtgttctttctctgggtctgtttgccttcatttctcagtcaatctcccagactatccattagtagtagaagacatcattggtttccaggaaaccaagccaacaaagcattatcaatgttctatgctaaccatgcttctgacctgatctgaagcaacccttggaatggacagggatggctggatcccctgactaggactccaggaaagagtttgggcagctcccgtaagctcggttgtgttaaagcattaggtatttctgtgaatgatggtttgaaatccacacatatattcataaatatcttcctacacttcttacacagaatctttatgactcaggaaagtcaatacaaatgatctccttttaaatatattatctttctgtatggaggcgttgtgagtgttcctaggaaactctacctaggattcagataagagaggaaaacaggtagttaatgatacaaagatgcgtgtgagacattttgttataacactataaaaacttgtgaccagtgttcaaaataaagaattccagcttccggtacacttacctcatcgaatcaatgctgtggcttttttcccccccgctgtcagaactaagcacagaatattcaagtgttaactaaggagaacagaatgtaatgctagagaaaaaaaaaccctatgatccccatcttatctcagtcttcctccagttaatgatgtgaaatcactcaaacacagaatctcactggggctcccactcaaaagctaaaggtgtgtgctggcaaataaaacatcattgccataaagacgactgctctacatttcagcagggctgggttgcacctgagtagttctgttatgttgggctgtttctgcaatttatgcatttgccaaagtgtgcccattgacttttttcccccaacaccgtattgttttcatagaactttcatcattgttgaaaacaccagtcattccactaagcctaaaccacagggcatgttgtttcaaaggctatgcattattggtacgctagttatatactctactgtctactcgctcagtcattttcacgagtgcttggctgatgttaataaatgggtaagaaaggcaaaacacaaattcttttccaatcatcagcctctgttttgtatcaaatggaccttgctcatcctgttcaggataattagctacctcctataccactgaggccacttcttcatggcctctacaacatcgctctgaggtcatttcagcaaagaagattcagcttgtgtggagaacaactgtgtttgcagagagcaactcagttttactcctaaattgaactgaatacaagatgagacaaagatggggcaagagaaaccctgggaatcagggtctagctttaactactctatgcctttagaaaaattttcaacaaaactgatgagattttcccaaatactgcaggtagccccagtggagagccttgtgggaagacatgcctggaggagagggataaccagtggctgggggtcaccctttccagacagcctggagaaaatggctctatcgtggtaggtactgaagtgggtccaccaactgagaccagtcctggaatcagactttcgaggtgtgactttcatatttttgtttgactttttgttttatccagacttgtgggcacaggtggaaaaatattttttacatgaagagcgataacaaactccccactggcatttgctacgtcatgccttctgatttgcggacagaactgagtaaaaggatggccccgtgttacaaaggtaagtgggacttgaccgaactagaggaagagaagcaaaggaaggagtccactcgtttgcatttgcagttttgcctgctcaaagacgaagaatatccttcataagggcattgttaactaacagtatccttcctttgtttactttgtgcagtatcgatactttatacaaacatgccatggttttgaaaagcaattcttcattttcatttgaataattgtggaagctagttggcaactatccaactttgtactaaatttatattttcaaatcagtctaagcatgtctaatgtcagggaaaccataggatcctcaaagtcatgaaattacatacaaaattcttattagaaaaaaaatgaccataattcttgttttcctagaaacttgtaggggtcttcaaaaggattcaaggcactagtcagagcaaagccttcccacttcctgttccccaagatattccttgaagatgtaaggaattactgtttatagcaacacttggttctcagcctgtgtatcacatctcctttggggctcagataacaatttgcctggggtcacctaagaccatcagaaagcacagatatttacattacaatgtataacattagcaaagtttcacttgtgaaccctcagcaaaactaattttacaatgggggggggtcgtcacaacatgaggacctttatgaaaaggttatagcattaggaaggttgaaaccactggtctaaatttgggtaactctgtctcaatggaaacctgtattttatgtacagaattaagatatatatttagattttgggacaaatgtcagtagctgtcaagataatatttataacaatcagtaactctaaaactgtctttagaacaccaaaaatatgatgaacaccaattcattttaatgataaaaaatactattattatctcccttatcctccaaagataaccttgattacctgttagaactttgaactcatacttaaatttaggcactggttctgatcattttaggatctttcatatctggattctgatgtcctggagaagtccatttaataactgtttatattttaccttaaatgcaagaagataaaatatgcatattaaattttcaattgcaataaaactcagtctggagttctgtatatttcttattctcttttgccttatagttttattttatgtatttaaacattttcctgcaggattatttttctaaaatatacctatctatattcttttagaagttaatatgagcatagccttattaacatagcacacacttgaaaggggtgagaagtcatggcagggagtgcagagacatccatggagtaatttgtcaaaaggaagaagtgggcctcagtttttttcatagaagtttatgaaggaaagagcatcaggagaaaaagcagggctgtgtcacttaataaactccaaaagctttgcagtaagagaccttacacatctgtccacgtgggtcttgattctttctgttaggcaaagcaggaaggaagggataatagcagcaaagtagcatgagacaattgaacagccacctgcaaaaagagtgaaattggatttttttttattggatattttatgtattctcatttcaaatgttatcccctttcccagtttcccctccagaaaccccctctctcatccctcctcccgtgtttctatgagggtgccccctcccaccttctcattcccacctcactgctctggcattcccctacaatgaggaatcaagccttcacaggaccaaggacttctatccatgccagacaatgccatcttctgctacatatgttgctagagccatgggtccctccatgtgcactctttggttggtggtttagtccctgggagctctgggggatctggttggttgatattgttgctcttcctatggggttgcaaaccttttcagctccttcagtcctttctctaactcctccatcggggtccccatgctaagtccaatagtcagctgcaagcatctgcctctgtatttgtcaggatctggcagagcctctcaggagacagctataacaaactcctgttagcaagcacttcttggcattcacagtagtttctgcgtttggtgtctgtatatgggatgaatctccgggtggggcagcctttccttcagtctctgctccacactttgtctctgtacttcctttagacagaagcccttctgagttaagaatttggagaggagtggggagccttgcctaacctctggatatggtctccacaggttctcgcacccctttgttgggcatttcagataatctcatccctgttgggtcctgggaacctcttgctttcctggcatctgggagctgctggtggctaccccctgtttcctgtcccccattgctacacacctctgttcaaattcctgaccttctgtatattatatcagtctcctctcatacctgatcctagctccccattttccctctccctcctttcttcctcccaagtccttcccaccctctgcctcctgtgaggattttgttcccccttctaagaatgactgaagaagcattcacattttggtcttctttattcttgagcttcatatggtctgtgaattgtatcttggatattctgagctttggggcacttatcagtgagtgcataccatgtgcgttttttttgtgactggtttaccacactcagggtgatattttctagttccatcatttgcttaagaattttagtaagtcattgtttttaatagctgactagtactccgttgtgtaaatgtaccacattttctgtatccattcctctgttgagggacatctgggttcttcccagcttctggctattataaataaggctgctatgatcatagtggaacatgtgtcattgttatatgttggagcatcttttgggtatatacccagtagtggtatatatagttggatcctcggttagtactatgtccaattttctgaggaactgccagactgatttccagagtggttgtaccagcttgcaatcccaccagcaatggaggagtgttcctctttcttcacatccctgtcagcatctgctgtcacctgagtttttgatcttagccattctgactggtgtaaggtggaatctcagggttgctttgattatcttataccatacacacaagtaaacttaaaatgcaatcaaaccttgactgtgaagcccccaggcctggaacctctggagagtaacagagagagtaatgatttcctggaggtcacaacaaaagatcaagctacaaaagggaagggacaagtggcagtagggcaagcatcagagtttttgcatagctcaggaaggcatcaagtgagcagcgagagaagctggagtcaggcatgtgcaaacattctcagatgtggtgatcattacacaaatatatatggaaactcatcaaagagataccacaaaaccagtaacctgattgcaagtcagttaaaccaagatcttttctcttcaatgaaagcagagatatggctgatggttttatgaagggtggttggtgttactaaccatcacagactgtaaatcaaacctggagatcacctcttatcttttgaaatggctatttgccaaaaagatgagagataaatattagccaaggtggcatgaatgactctacagagcatcatgagagactctacagaaggttctcaagataaagaaaatagaaactccacacacaattctatggtcctttcgggagtgtgagagcaaaggactcatgggtggtgcatgtatgtgcgcttacatacaatggactatcctctagctttagtaagcgctgccatttgggatcccatgcatgagtatggagaacactgtaaaccaagcacagaaaacaacaagcaattacatttatatgtaaaatctgaaaatactaaacacagggaataagagtggccgagtggttgggggtgtgggatgtggagcaggatgaggaggttcagtcacaggaccctgagtttcagttttgtcagagaaatgaatctagcaaggggtttatatgcaacatgacagcttagtgtgggattttgccaagaaggtagattcccattgttgtgaccacatgtagacaaaaagtcaccatggaaagggagtgcgttgctgggtgaatgaatagccattctacttgtgtgtcccacagaattatcgctgtgcacctccaatatatgtagtaactcagggaactgtaaacctaaagactaaaattctagctcttggcctttcactcagtgattcattttaacttttagttatgtgttgccaatacttcccataaagtggaaacagagggagaaatacctttaattgtgattcatgatgataatttgaaggttaatacaggagaactgaatgatcttaaatcatgaaaattactattattttcaaaagtagaacataagacacagatcttaagactcatgtttgtgaaaacctctgagaaaaataaaactatggtgaatggtcattatgataaaaattcaacctgaaccatgagaagactgaatcagaaggattttgagttaaaggccagcctgggctctacagccaaactctgtctcaaaatatatattccaacttgtctaaaccaatattgaatttctgttttagattatacgagaaaatttggagaaaattttgcatcatgtcaagctggaatatctagtttttacacacaggtaacagcttaatactacctccagtgattgtatatgtatagaagcttaattctggggtttctctagacttagtgagtaacatttaagtgatcttaagctgtagactattattaccatgttcacaccaccatctgttttacatgtaattttagaaaattataattgtagttttataaattgtaaaattgtaaaaggctaatactacataggatcaagaatttagtggaagtctaaagtagctagttatttatgttgctaacttcaaagatgaacatatctatccaaacatattgttttaattactagttgaaagtgaaggagataaatgagtcccttttacattaaaattatgatagtagtgaggcttaaacttacaatacccttgaaaatcagagataatcctgacctctttccgatacccgaaactcaattatatcttatcctcagtttaaatggtagtaataataacaataataaatgttgcaggttttctcagaaacccattataattccataaatggtctctaactccatggagataagacattatcactttggcttcattgcctttatccatgttaacatgttagaacaattcctcttttagtttgtattgaactgactgcactgaaagctgagggttacatagagcatatactatatgttaattagctttgttgctctgggttgttatgcaacagaggcaagagcctggcccactcttccttccttccttccttccttccttccttccttccttccttccttccttccttccttcctagttaggctaaaatatgccctaaatttcactagcctttttattatctgagctgagattgttagggacactattcagtgatttttgcaaattgaaataaattaagtctcctttactctctggtaacacatgattatcctggtaatgaactctaatgaattacacacagatgattgtctttcattgacccacattgcctttgtccccaaagcttattctagtgtctaatggccctgcctttgatatttgaaacccactggtaaatgggcaaaaagttccagagtttcttctctaaaattctattcttagcttttctggctatttaacatatggttttaaattaataaaatgttcccctttttaagcttcaatacaaaatgcctttcctgactatttgcctagaatgttgtatatttgcaagaggtttggtgtggtatgatttaactttcaaatcctgagttttctcttgcaggatttaattgtgatgggggccccgggatcatcgtactggactggcaccgtctttgtctacaatataactacaaaccaatacaaagcatttgtagacagacagaaccaagtaaaatttggaagctacttaggtactgtaaaaatctgaccaacttgaattatctgtgccttagaaatgatatatgcaccctactggccagtaacaattaggtatatcagaaactgtctcaattaagcataaagccagctgcatttctttaactgtgtatcttatactgacacaggtagcattgtcattgctgcatccctatgtaggaagtggtgaatgcttacttcatcttaggaagccccctccccaattccttttttcttcctttattttttctttccttcttttcttccttcttttccttcctttcattgttcttttctgttttctaagactaggtctcatgacgtagccctagttgacctctgacacatgagtgctagaattaaaggtgtgtgtcaccactcctggctccctaggaagtttttatgctaactctgtattaatgcattcatttaaatacatggctttgaatatatatgcattaattcttagactagcaaatgaaaaccaatggatcttaaaatgacctcctagctgaagaagagcattgtgaagtatattctaaaacttatgattttgacttcttccttatagaagttttgtttttaagattatcttggactgtttctcaaagtttaaccattttcattatccttttctccttcctcctcattgttatttcacaagtcgagaatatcatatttgtcccctatatctctacaacatacatattttgtgacatcatttctctttacagtaaagtacatatgttctgtagatttttttgtttttgaacaaagcacaggcttgtttgacccatacgtgctttaagtgtgagcattttgtgttcagaaagggcagtgataaaacaagtaggatattactatcattccaacagaattcctcagacattaccttatgtgattgaactatggcttgaagtattacaggaaatgtaacccattttctgtctcttatcacacaaagttatatatttatgtaaagtccctgcaatagaaagattgcatgaaacctgtaaagattgtcctttgagagcttcagagttttgtgtactctcagatgttgcatctgtaatcctggatgaccatttgataatcatatcacacagacaataacagatcaagtgtcaaggtcatattttcaatatagagagcttggaaattcaaacctgtatcattgtttttataatatatatctttaaattgcttaaatgcccattttaaggtaatataaatgttttttgaggttctctgtaagctagtcactttgagtagttttggttacctcaatgcaaagagttagaaaagcatatatctgcggggaatgatgtgcctcatgcgtttctctccccttatgcaggctactcagttggagctggacattttcgaagtccacatactaccgaagtcgtgggaggagcccctcaacacgaacagataggaaaagtaagacttgcattttctctctctctctctatttcttcacaacatcttgaatagattatatgacagagtaaagtgttaaagagacactgcaaaatataagattcaaatgatgagcagtatattgcatcagttgaatctgttcaagatttatttatagctctcaaagaaatttagctggaaaattctaaagggaactatataacttaaatgaggctttgttatgagtaaattgataatatataaataacaaattatagataatatagtgtgataataaataaataaaatataattatctatagatgcccagaaaataaatttactggttattatttaataagagggagttgagacaggccatgctgcatgataagactagaaaaaatagaatagaatagaatagaatagaatagaatagaatagaatagaatagaatagaatagaatagaacagaacagaacagaatagaatagaatagaatagaataattctagctctaggtttttctacttttccacatgaatattgggacctcaaaaagtttttctttggtaaacccttttctgttttgttttggtttttttttttccctacgggatccaaaagttagttttggggatgatagggtttcaagtcaagcatatcaatgtaaatattaatattacatatcatttttaaaatttgtagtggtaacaattttattaaacacttgatattttatgtttgtccatttacgtgttgtagagattgatatttttattaaacaaataagttggattatttttaagagaaaatttgataagaaagtaaatgtctttggattctttcccccaattgcaggcatatatatttagcattgatgaaaacgaactgaacatcgtatatgaaatgaaaggtaaaaaggtaaatacatttctgcttttggtgttgctgggggcttctatgaatagtgccgtgtattctcattgcatatattctttgctttggaacagcttggctcatactttggagcttctgtctgcgctgtggacctcaatgcagatggcttctcagatctccttgttggagctcccatgcagagcaccatcagggaggaaggaagagtattcgtgtacatcaactctggcatggtatgtctgattgtccccaaactggaagtcatacgtgaattataattcagactgaatctgctcttactttagagttatgagattacaggttctttttgaaattagtgtgttcatgtacacaagtgcaagacgcatgttcatgcatgcttctccgtgccatggtacatacgtggaggccagagcaaagcaggcctctcattctactgcatattcctgagatccaacttggatcatgagactcatacaagaagcacttttatccactgagcacctttgtcaggccatagatggatagtcttaagcttatttgatggaccaaagtaaaatttctactgttgtattgacgctccgaaaatgaaaccaagcatgccaatgagtaactattccagaaacctgagacagaacacaaaggaatctatgggcacagcctgtgcgagttcactctagtaattaaaacctcctttagtttaattttcacacaaatataatttggaagaatggtttttgcagatacttcaaagcagatgtttgtataactcaataattatcattcttatataacttagtaagttattaggaatagatgaagcattcaatattttcaacttcttcatttgcaaacagaaataaagtctgttgataaaaaactattgcacacttcagttggattagattctaaaataatatgagattggcatcacttattctgaagtggctacattattaagttagatatttactgaatattattcattttaagtcatgagcaatatttggtcctttggtttgaaaataagactgggcttgtaagaaagcaggttcactttctaggacacagcatcttttagtcacgatttagtaaagtgcacttgtaaccttgctcactcaaagtttttcagaaaatttaataagttttcacttccaatgttatgctaaactctacacaatgcaaaagaaaaggcttctagggttccagggtggacgtcttaaagttctgaaaatagactagagggttacagatgcagaggttcccgaactttctttaaactaaaatatattgttctctgtataggattgtctcagatatcattaatggcagcatgaaaacaattgtacttcacatttcatagatgtgaagttgtccccactcacagatgcccttccttgtattcacttacccttagtcagcaagtatctctcatttttcccttgtggcaaatatctggtatattttaaacaaggaaatgttttaaaagtagtttaacagtaaaaatcattgctaaaataaaagaacattttttcctccacagaaatcttagaccatccacatatgaaaacagataaagggaatgctcagagagcaaaggaccagtcactaggctgcccttccctctgactgacccagacgcactgctgtggaacacagatcggcttagtaactggatgccatttttagatcccacagtgtggatttctattcttctctttgcacttacctatttctaaactctctgaaatggcactagccgctaagaaacacaacagtttctttcccccatttgtcattgcctgtgctcaggataggactcatctgttttgtttacccttgttgttttgtggcccatacaagtcctagatcagcagacactccagaattattgtcaatgaactgaaagaaagaaggttatttgaaggacttgggttttgacctaatctattaaatagctctcaggggtcctcagtgagcacttagttgctattcttgatgactgtaggctacttgaacaggagcaattaccacatattctcctggaactcttctaagtcggcattgtcttgagggtatacatcacatgtcttcacagaaaccccgcctctcttccctttagtcatttcctaaggcgccagcccattgtatccttcagtccttggatttaatcccattccatgtcaatgatagtgattacatctgtagagatagattcaaattttaaattcatttagaacaaaaatgagccttagtgaaaatctggaatgggaaatactatcaaaaaaagctgagaataatcccagttgtgactcagagctcattctcacagcatacttggacagttcatcctatatacaataacagctcaccttcagcttcaaagatgatgataagtgcactgctgcttagataaggttccaaagggcagcttaggtcacatcatctgttatctcagagacctccatggcttgctatcctttgcttcagaaagagtaaatttcccttttaatccatttgctatatactgtaagacagcaatgtgtcttttgctgtcatgttcattatatatgtttattaattaataaacatatgtagctgttttctgtagatcacagtcacactttccttgcagtagccaccttacatgtccctttgtgaagtctctctcaggtcgtctttccattctgctccttattggaattccttccttgcttcagttagaactattctcccttcttctcattagtgcaaaagtaatttgtacgtgtaagtcatgtgcatgcttgtataaagcccgtcttgtatccatggttcctggaggaagcagggtgttgcttacatatactcctccatggcccctttcactggttcactctgcccagtgagtgcattgtctttagcaagagctcaataaatgtttgttaaattgaattattaaaatgatttattggattttcaaagctggggatcttgggttcgacaatttcccatgtcctctgagctctaatcacactattctatgtgttgacttaataaatatttattgaattgaactgggatgtgtgtactgaagctctctctgtggtttgatgcattagaaaaatccatatccaattatagcagtaaagcacgtgacaagttgccaggcggctttataatgacacctctctttccatcctcatctagggagctgtgatggttgaaatggaaagggtccttgtcggaagtgacaaatatgctgcaagatttggggagtctatagcgaatcttggcgacattgacaatgacggctttgaaggtaattaaaaatctctagtttggtacttaatttctacatttaaaatagctcaaggaagcaaatgtgattgtagttttgtgcttgttcacctttttgttgaaagaggaaccagaatgatatgccacctagattttgaaaatgttatgtcagttattaatctttatcacagttaattagagggggttattcaaagcatttttattggttctaaaggtaccattgattataagtagcatcattctttactcatctctaaaatgatgcttatcaactcttgatatccatcattttactatttaaaaatgatcctgatattagaaagaaattatgaggtgtctatatcattggagcatgatatttaactaccagtacagcccagaaactgagcaaacccaactgagtctggaggtgaaagtggagcatgttctggtgccccctgctatgcctggagtactgtctggagctgctttgctctaggatctggcaaggacccagcaaaagtcatagcattggtgaggggcagagtagtggctatccaccaattgaccttgaagcatttacatgattaataaatggcactgtcttaaccatgcatcctgccctagacatcaggcttgcagtagaaatgccttcctctgcacctgtctgctctcagcctactactgggagttaactgggcccatgaaactgcacacataggataaatatgtgttagaggagagtgtatggtttcccagagtgcaataacttcctacaatttagaaagtaagtttttaatgtttattttcatgccttggaattgaatcttcttgatattgccactgataattaaaatatggtttgtcttaaatagcagtcaaaattaccactgtagttgtgaaaaaattgagacaataagtaatatcatgaaaataaactttctgttcttcagatatcagttaaaataattaaaacactgcatattattaagtgcattaatatgcctccatagcatcatgtggtataacaatgacatgttcttgcagctatggaatgttaattttcttcttcgtgttacatgtatttacatcacttaagcaatgagatgagtcagcatgtttgttactcttgagttgtttttttccatgttttaatcccagtgtcataaattcaacattaatcacaataaattcattctgtcattattttacaaacaagacattttctgaaattctatttgtatgtgtgtgtatctctaattaccactactggaagaagaatggattcagaaaccattttactataatagaaaagtctagagattcaaaactaaggttcctgtggtcatacagtctcccattataacacgccagatgctgttatatgcatttgatgtgttacatcctctcataccaagcacatttgtctttgtgtgctctcattccatgagtgggaagcaagacacatagaataaacactggggacatacagagcagcagggcacagcgacagagctgaggtgtcaagaggtatgtttgcagcccccgtacgcttatccgttatgacagagtgtgctgcaaaaccacccactctggtattttccatacgcaaaatattatgcataatcttgaagctcatgtagttagttttttgttttttgttttcctggcatagtggttgtatttccttataagagggagttttgaagtggatgctcacagtcagctattggatggatcacagggcccccagtggaggagctagagaaagcacccaaggagctaaaggggtctgcaaccctataggtggaacaacaatatgaactaaccagtacctctggagcttgtgtctctagctgcatatgtatcagaagatggcctagtcggccatcattgggaagagaggccccgtggtcttgcaaactttatatgcctcagtacaggggaatgccagggccaagaagtggaagtgggtgggtaggggaatggggtggggaggagggtctggggaacttttgggatagcatttgaaatgtaaatgaagaaaatatctaatttaaaacatagagggagtcttcatattatgacacatgcattcagaatcatgaaggctagctttccaagttcatcctttgcatcaagagttttaatattttcatgatttaaatccgacagatattgctattggtgcaccacaagaagacgacttgagaggtgctgtctacatttacaatggccgagtcgatggaatctcctccacctactcacaggtaagatgctcttcagacttgcacaggaacatcagagactaaagtaccctcagtatttgtctggtaacgtggacttgttgtctctctcaaatatgtaacatttttatttcaccacataatattggtatgtgatcttattttaactctcaatacaattttctttaaaccctttattgccactagtgttccattccattttttttcttgtccttatgtgtgacagcacatctgtgtttttgaggcaatggccattatttcccaactttgcccacttggataccaagcgcaggtaaagctttatgctttacagagctagcacagggagtgaaatgcattcatgagaccatgtttctttctaagtataatagttaaactaataatatcttaatacaaatttatgacaaaactctcatttcaattctatatcttgacacctccagatatttcagtgtagaaaaagacctacattctaagaaagatttttttcagagatttgctagctaacattattttggtgtgaccaaaaataggcaagtgaccctctaaatttaatttaaaagttaggtatatgtcaagtcaaagactgatttttttcttcctgtgaatagtacccatgtatttctaattcagtgtttggacatgaaattaaatagatggagcagactgaggtgtggagtgttcttgaacggaaaggagcaatctgtcgaaaccagtaggttttcatcagacatctgaatagtaatatatgataaagagtaatagatatcttatttttcaaaatctctgtttatttattaatgttgattatggaagtaaaagcagaacttgaaaaaattcaaagacaagaaataagtaattgttttggaaacactaaaaattatcctataaaatattgcctttttcacaacataaagtttttgtaacaaaatagatttcaggtgtttttaaaggtgggaaattttacatctcttaaagtgtaagaatgtgttttcttggtcagtgtgctaagacaagcctgagaagatccattatttaactaagtaaaatcttggaaatattagatattcccaacaagattacacaacacagcccctttatttttcctagagaattgaaggacagcaaatcagcaaatcattaaggatgtttggacaatctatctcaggacaaattgatgcagacaacaatggatatgttggtgagtagatatgtccattttcaggtctgggaaggaaaaaaatttttttgtgggatgctgctttagtgtgaacatagaaagccaatgtgaaggacttcagattactcataattgtgttcttgagaaagaaaagaagtacgtaagaaaccaatcaaacgtgatgaaaagcaaggagatatctgttttgaaagacgtgaaaggcgccttctggaggaatgcttccggcttaaagctttatattttgtttggcagccctgttgcaagcatctagcatcccgtttcatttctttcttataaaacgattgctgctgctacttctgggtgcgtagattcagacatatcatgaaatggatctgaggatgcgagcttgccgttcccaattatgtttctgtaaatgctattttgatacagttgaaatgtgatgattagtatttgctgctgcaaggttattctctttaactaatagtgattggtaatctaccctgttgatttattatttttttattattattactattctgcagatgtagccgttggtgcatttcaatctgattctgcagtgttgctaaggtgaggttgatgtgtgtcactccttaatgacagttgggcctaattgtagagtgtgggcggcaggttttaaaagcaacggccttgatgatgctccttttggtatcctggagtcctatcattaaactttgggatattttttctcaccttgtttagacataattaaacagaccatcagataaagctaatggttttatagatttaagtgaaaagttctcttaatctgtacacaaaatataatcatgcatgtatgtacataccactaagtaagcattttaatgacgttgcttgtttgttgggaacaaatgtaattactgtctttacagtaagattattctataactaatattaataattttattgccttcttaggacaaggcctgtagtgattgttgaagcatctttaagccatcctgagtctgtaaataggacaaagtttgactgtactgaaaatggacttccatctgtgtgcatgcatcttacactgtgtttctcatataaaggcaaagaggtcccaggctacatcggtaagcacagcccacagaactaataccatacactcattctgtaatccaggagtcaattgtgtgccctcatcatccattatcatgagcatttgacatttctttagagcagaatggaacaatcttttgatatgcacctcttgtctgtcttgtttttgttgttgttgttctcaatttgttctagccagcatatgaggcacaaaggaggtttagtgcataactcaagaggaggagctaaggccaccccttgctgcgttaatttaaggtgaaccctctgtgtgtaacctgtgaaatcttcagaatcaaacgagggcaccacagctcccctgcttgacagggctcctcttgaaatgtttttattgttactactgccttttccacagaaatggagaaagaacatagagccttggggatgctgtgtaggtgtcacatcactgaattacaccctcaacgctactgagcttgtaaaacctggagcatagcataggtatgaaggagtaagaggcacagggtcttcatctaaagtgtatgctgttatatttgaataattaaagatgcttctctggaggctggacctggatttagtatatgtaatatgctgccaccctcagctctgagaactgtgccccttttccatttatagggaactcttcaattgactgccatagagaatatagcattaatatggatcattcaagagggtagttaatgctaactttcacacatacacacacacacacacacagagagagagagagagagagagagagagagagagagagagagagagagagagcagcctttagaatagttactaatgaaaatggcccccagtaagtcatacttctacctggggttatcatcgtttggatattagtcacttgtgaaattgattgagcaacaactgaataggctgctgttatataaagatcacagaggctgccaattgcttatggagccaaacttttgatgtgtaatagaggttccagtctgagcaattttgttatgtaatgggcagcatgaacccagcatctgtactttatgagactcattttttaataatgctcttgaaaagccctggccaaagctgaagtaataaaaagatgggcaaagcttcatctggttattggcacctggggagtgtgaccccagagtgaattacacattagcatagacaagcggatggattatctgaaagatacacagagtggatgcggctgtctccttgttcttccaactcctttgcactagatctgtttcttaatgtctgaaaatgaatatatgaaacacaaataatcacagtgttcttatgaaagcggctctggtaagaataacccacatggtagcttggtgaggtcattatgttctgcctcttgaggggaatacatttgtagtccctcctttacctttgctctggactcaggtgataaatttgaaaatggttacttcagttgcaactctctcttgctttctaggtaattatattacagttattgtaattttgaattcaattgatttagactttattttctaaattaaatgatggttgaaaggtttatttgaaaatgaatgtaagactaacaagtttgatgcatacattgtgggcaaaataccttcagaaaagtatgtttcttttcagatgtaaatgaatgttgcagaaattatatatatatatatatatatatatttttttttttaaatttacttagatatcattactcctgtgcagtgagggcaactcagtggaggactgctctcaagtcactttgtaaagaacccttttagagtcaggaaatgaggcttacttcctagctataatctgctttgatgattttatggcttttaaaatccccctcttcttttttgatccaaggatcttgtttttcagctaaatattaactatgtcggattttaaccacccctaaaccactagaatatttgagagaaagattatatacttctcattttcattttagattaactttagagggtcaaaccatgagcagtaaagtcacaaagaatgaataattggtgattggactgaaaggaaggtatttttttagtaagccattttataaatttttgggttttgacctggttgttcattttatataggaaaattaaataaaatatcaaactttcaaataagaaacacaaaattaagggacccatactatattagacattaggcatgcaccacacaagtcagctattgtacaagacagattcatcctgagagatgctggagctcacggctctagacacacttctgtcattggctgatgcatagacaaacagactcgttcggttagccaagatttttgtgtggttttctcattcttatatgtgaaaagattaagcaaataactaaaggtgttaataaagataactggaaaataagttaataattttttattttattaaatataattttaaagaatattttatttctttcttttttcatacttcagtttatctgcttcacactgatccaaggaaagaactcagggaacttcctggttgacttgtaactgctaatacctcagtgccttaggaatggatgctaatcacgatgctttctctgtttttgcagttttgttttacaatgtgagcttggatgtgcacaggaaggcagagtctccgtcaagattttatttcttctctaatgggacttctgacgtgattacaggaagcatacgagtttcaagcagtggagagaaatgtaggacacaccaggcattcatgcgggtaagggaaactacttaacgatgaaatacagacatcccaattgtccatgcggcagcaagttactgtgtgtttatgggctgttagcttcctgtcccggttaaaacattaggcagcatcaacctggaggatgcaaagtctatttctggatgtatctttatcttcatctatcacatttgtctgtgtccttgcatccagagactttctcttcctctgattgctattccctgtgctcctttacccagttgtttggaaatgtacctgtattgttctgcagagcctcagatggtttctatggtgtgtttggggatgttagtttgcttttcatgacctcagctaggcagaagccagcacgaatgcattggggctattagtcctcgctgcagctttgttggggtgtcaatgggagcttgtgcaattgaggctcggtaaggctcatttgtgggccaggatgacagctctcatgatggttcgggggtggataatcctgccaaagcacagcaaatttcatgtttcttttatgaaaacactcattcccgagccaagcaccatgctcctcacgttggttaaattttagcatctgctgctgtgccaggttcccccccacccccactggggaatcatgtattccatcagaaaatctattgtcacaaggaagcccaactattcctaggagccctttctgggatttggaatagtagcctcagcttagaatataatattccctaagatacttactccaggaaaggcaaacaagcatcaagactggttcactgtgtcttctgagagcactaacaggccatttccccatctcccttcacagggtttattatgctagagtaaagctgtaagatgggtcagagccaaacacatagaacagtatttatgtagccatcggttaggtggcatggatacgagaggctcttttattttcttccttcacagatgcgttttgacttatattagtcaattacagagagaagggctgaggccattttcagggcaacatgaggaccacctttagatgttctcaaggaaacaggttgtgtttaagttgcaaaaatagcagcaatttgagtttgatttattttgtcctgttccctggcgttgttcctagtaataaaggactggatcatccaaattgtacattttcttcagagcacatttggagtagaattagagcttagcagaagtttccacgatctgtgtcatgtgtccactcagaattgccatggcttttgtgataatgaggggcactgttgatgttgggccctatcatgaatgtattattattattattattattactattagtattgctattgtaaggctggagagcaataacagtgggctaggcagactctccagcatttaattgcatcccaagtcctcctattctatggcaaacatttaattatagtatctagtgatgcgatggggcatgcactatgtggagcttaaaaaaagtcattgttttctccgtttttttctttcctaagttacataagcaacttcaaccttcatttacaacaaacccagagaagacgtaggaaccacagaagcaacagtttcagctttgagttccggcaaggagctgtagctattgtacaagtgtcagtgcagtctcctacccctgcctgtctggtggcccacaccattaggagacattagcattcttattgttcacagtttaaagcacaggatagcaaccccacatcttattctctctctctctctctctctctctctctctctctctctctctccctttttcctgatgaaacaaagaagatgggcagtggtcagattggctggctagttcttgtgttccgtaaaagatatctggtatcagaatgtatgcatttgacctagagcccctcaagattaaatgtgcgaacatatcttgatatagtattcaggggcattggggaggtagctcaacttgttaatcttgttgttcttccaaaggaccagaggttagttcccaacacataactcacgacctcccataagtctagttccagacgatatgaccttgtatggccttccatgactcccacacacacagatgcatgtacacacacacacacacttgtgtcacacatgaataacaaatacaaataaaattaaatctttagagtagtctttagagtcttgatttcaggctcaggacactcagcattcaggactccctgctagtggataccaattaaagctcaattttctctttcactaagttctctgggtgccactgggtgtttattaaatagattgtgtcagcttctgtttgagactcttatacattatcagtgactaaaaaatagcaagatcacacccttcatgcagtttctatgctggtggtaagaaacaaaagcatgctgggaaagaaagctccagtattctacaagattatacagacaagggaaaacaagtgaaggaggaggagccgaggacaggagagagtgagatgctggttgggaggtggacataagtaggaacaatatacataagagtagggctcatttagaaggtgatatctaaggaaagattgaaggattgaggatttttcccccatgcaaaaaaagcaaggctgtggcccctaacttcagtgtatagcagcaatatgtataagacttctcaaacaatatggtggactgtaggtagagctattgactgcacagacctgcagaagctatggagatctgctgtttgatcaagtccctgcatggtacatgtgagaatctcagacaaaggagcagaaggttctgggacccagttttcaaatgcttcaggacaagaagatagcaggttggtttgggggacaatagagaggtgaggttgactaacaaaagtgaagagtggggatgaagggagaacacttgcagacagacctgagggtatctgtgagtttttctctagtgagctggagatttatggtagaaatttgagctgagtatatgtgacttcagtatgaaaagcactttggctgctgtggagagaggattgatggatcataggttgcaagcattgacacagaaaagactactgatatcaccaaggtcagagtaatgtttccatcagaggtggttgaagacagattctatgccatttactaacagacactatatcagtcacctgaaggagagtcatcaagacgagtacagagtggttggcccctagcaaccaaatacataatttctataagttcagaaaaacaaatactgcaaaaaaaaaaaaaaaacaacttttacttggaacactctattgttcagttgttaccttgctgagatgaagacatatttaacttctcaaataaattatcagttaatcatgggcatatactaatctatacttggagaagggtaacaggaaggcctgtcaccatcaacattctgaaatccagtaattcagtaccttacaattagacttgtgtgatagctgaggggtgaaagagaaaaaaatcatatggaaataattgagaaaagatagggttatttttttttagggcctggtgaaaattagcgtgtgtttgtgtatgtatgtatgtgtttgcgtgtttgtgtgtgtgtggcagtggttgtatctctcagcatatattaaacatcaaagtttttatgctttaacgagatgatttgtatgacatgtaaatggtatgtcaataaaggcattattcttaaaagcacctccataggcttctccagtgctagtgacatggccctcctccctctgtacttgcccatgaatgtgggaaaatgattatcctcacacatctatgtggattcatgcttgatagaccgggacagaagtgctaaaatagccttgtatctattgactcttcctgtgcagaatggatgtattagtaaatatcttcaaatgtttatggctgactaacttcctattttgaccagatctatttaaaatatttttttctagtacttaagtaaaatgagaagatgtgaacctgcagtttagttgtcaacttggtcagacctacagagttctctgaaagaaaaagaatacagactttggctaattttaggcacacactgccttagtcagagtttctattcctgcacagacatcatgaccaagaagcaagttggggaggaaagggtttattcagcttacacttccacgttgttgttcatcaccaaaggaagtcaggactggaactcaagcaggtcaggaatcaggagctgttgcagaggccctggagggatgttacttactggcttgcttcccctggcttgctcagtttgctctcttatagaacccaagactaccagcccagagatggtcccacccacaaggggctctccccctcttgatcagtaattgagaaaatgccttacagctggatctcatggaggcatttcctcacctgaagctcctttctctttaataacttcagcctgtgtcaagttgacactcaaaactagccagtacacaagctaatctggattcttgtggatactattttatgaaaattcagataaaaacatggcatagaattttcattatgtttaacaaatagcatatgccatttcataaatacacttctaagcaaattcatgttattcctctcaaatacttactcagtaactctaaggtatttgtaatgttttagtttctgtctttaggtagagctgattgaattaaacaagttatgtgtgtgtgtgtgtgtgtgtgtgtgtgtgtgtgtgtgtgtgtttacaaaagcacatgtacattccttatattatgagaaaagcataattaataggtaattgggataatagaagtaatgtacaccagatgtagagaagacctcgtggaaaattagtatgaattagatgccatgtgatttggtcaatgcaagcttgttgagaagaattaaaatagtggacatgtggagggatattcagtggctgtctagttcctgtgcccggggaataatttaatcaagtttgctattgtaatactcagagcttcaagctgtttcattttcacaagttgataacttgggatttgggttttgatttgcagcattcctatatggtcaaggtttcctgttgagatgatcatttaccaagtaatgtttaaaagaacatctgtagataaaggaataaaaaacgtattctggaatcttgaacactgtagctaaggctccagctttatcagatgccgttgatcactataagtgtaatagtcactacaacaccattttctacttaatgttctctgagtgacaaaaagtcccacttttctaggcctccatgtttctccacatttattaaagtcaatctcagtgtttgattggctatctaatatagctacatatatatatatatatatatatatatatatatatatatatatatatatacatatatatgtatgtgtatatatgtgtatatatatacatggttataacatctgggcgttttacacacaccatgtgatctgaccatccctacagtatgtatacatcatcactatcattgccactgtcattttcagataatgtaaaaaaacataaataacctggccaatgttatacagatagaaatgggcctgcaatgaggtctctagctctagtcttcttcaagcaaataattcagttgagaaagaggtagtttaactagaagtttatttaacaaagcaaatcaaagtatttactccaaagagagatctgaggaagtttcccccaaacagtttttaagggtaaaatgagtaactcttttcccatcacacatcatggtggaccagaaattccactcatgatcttctacattttcccatgatcttctaaaaggcacgattcaaaatcgaaaccatgacataaatgacattataatgaagctaaggccctttcaagataagaactctttattagtgcccatgtccaggaaaatgcccaggaatcatacttctatataataacaacctatctctatcataaagtgaattttaatgtcaggaggcatagctatgataatttagccatcatatcacacatctaaatcttgttttagatagctggaggatcccatgattgtttgttcaagtttttttttttttaaattgaggtcttatcatgaaagctggggccatggtttcgcacactttttttccagtcctacagacagttctacttctcagattctacctaacagactcaagatttaaaatccaattttccacctttgtacaagatatttttaagcacgacatagcaatatccattatgtgagtagaagaagcagttgtattctttctatttgtagttttgaaaatgatgttgaataaatacaactatttagtatttgccacccttataaatttattagattgattttcatatctgagtaacacagcaatgatctgcaatagaggcttctggcttatagagattaccaaggcaagctaacaccttgctatacataatgaatacaccaacattctcagttattgagtaggtggcattactccacctgaatgtccacagcccacctaaccccagcttttctgtatgtgtgtctctgcatctattccttctttccatcactggatcagttatgtctatccttagagccattcaagggtgtggcaggttaaaatttttgactgtcttgggtgcaaataactgagtttctttgatagcccagaagaaacttgttgaatgaatttattaaaatggaccttgtaaattgaagaacataggaaggttgagtcaacctgagcttgatagttaaatggtgcagatgacaggacaccaaacatctgtgcctgtttcttcagattacctctagatagagtaacaattctaacatgaaggaaaatgaagactgtagattttctaaactggtccttgtgtttgtggacttcatttgtggagcataacctgccctctcaaattctgaggttattttcatttacgcttttgttgtgcttagcaacatgattgcatgtattggtctttaacatattttatttcatgaagtgctcagttgacttctgttataaaagctcacatgttgctttgttagtaaagatcccattacctccccagacgaggaataaagggaaatctgtctttctagtgagtcttgagcaagcaataccatgctgtgtaccttagcccctcacatgcatgtgttttcaatttgagaataacttttggatatactgtagtgctgatttaattgaatcctgaatgctttcaggttatttccacttgattaaattgtttccgtttttaccatatgttagaaaataagttttgaagatggaatgacatgattttaatgaagagattagtaaataataaaatgcagatataatttttaaacattctaagtttgtgggaaatattcctagaggaaataaaacaaatgcatgcttgcagaaattaagattaaaatgtaagaactgataatgtattggagtaagcacacctttgtcattggaaatgtagtaaaatgaatgttaaaaccctaatcatccaacagtgtatttttgaccaagtagctataagagtaggcacaggaaatgctatgtagagatcaggaagccactacatataaaagaactgttttcaaagcaaaatattttgtaatggctaccactgctgtgtcattggtaaataaacctataaacactttgtgtgtgtgtaaatcataatagcatagcaaacgagaaaactgtcacaataaggaaattcaataaacttagaaatgcaatgctaacattattcctgtattgctagtcatggtgttatataatataaagggaaaacgtcattatgataaatgaattaaaaaaccagaaaatttcataataaatatgaagttgaatgaatcaaactgagtacaaagtgttccaagatatttacagaaatcttattgagtgacattattttcctataagcatatatggggctattaagtgaaatagaagtgttaaggaaaactttgaaattatttattgagtatgtaaatgaaaatgtgcatattataataccaatatacaagaattatacaaaatatcatggaaggggaagtgctgagattccaccctctgcaaataccatcagatatatggtaatagttttccatttcataatctctatcctgtcacaagccacagggatgtttctgtagtgcacaaagaacatacgcttcaatttttgtaaaagtaattctgctaaaatgtggattttgagctgtgacgaaaggatggaccatctagtgactgccatatgcagggatccatcccataatcagcttccaaatgctgacaccattgcatacactagcaagatttcgctgaaaggacccagttatagctctctcttgtgagactatgccggggcctagcaaacacagaagtggatgatcacagtcagctattggatgggtcacacggcccctaatggaggagctagagaaattacccaaggagctataggaaactgcaaccctataggtggaacaacaatataaactaaccagtacccgggagctcttgtctttagctgcatatgtatcaaaagatggcctagtcggccatcactgcaaagagaggcccattggacttgcaaactttatatgccccagtacaggggaatgccagggccaaaaagggggagtgggtgggtaggggattgggggggtgggtatgggggacctttgggatagcgttgaaaatgtaaatgaggaaaatacctaattaaaaaaaaactgaaaaaaaatgtggattgtgtgtgtgtgtgcctttttttccccctttagaaggaaaggattttgtgaaactttttctattcatgcttcctgcttttatttgtacacactattttcaattcccttagaaagacgtgcgagacatccttacccccattcatgtagaggccacataccaccttgggcatcatgtgatcaccaaacgaaacactgaggaatttccaccactccagccgatccttcagcagaagaaagaaaaagacgttattagaaaaatggttgagtattttcttgtatttaaaacataattgaagaatttttaaaataggacaaaattaattgaaatgtacctgaattgttcagaaatttttataagcattaatgaaaatagatttaagatttctctctctctctctctctctctctctctctctctctctctgtgtgtgtgtgtgtgtgtgtgtgtgtgtgtgtgtgtgtttaataattcctttgggatgttcagttgaatatgtttatattgcatttagtcacatgagtaccttcctatatataaatgtttatgtagagtatatgtaagtttttctccccttgaagaaattaatttctcaagagaaaccacagtaggcattggttgtgctaagagtcagttattcaatgccattccatgttctcttccctgttccatgcacccactggtcaactctgttccatgtacccactggtctgttccatgcacccactggtctgttccatgcacccactggtctgttccatgcacccactggtcttcccctttccatgcacccactctctcccctgttccatgaatccactggtcttccctgttctgtacacccgctggtcttccccattcttgcatgctctggccttcctttatttatctcttactttttttttcttgtgtgtctctccctcgccatagatccactctgaatttttagttctcctgctgaatttctgtcacatataaacacatttcctgtgtgacaaaatttctcttttaaaaattcttttatatgtttatagcctcatctcagtaacaactgcctattaagatgatccctgccttctggccagtgaactgttattcatttcctaaattgttctgttctagagtatttcagtttccttgacaatgtatttgcgcatgcagtcctagcgttgagaccttaactgtctaccaacgtagtcctagttaacagtttgcactggggcacagtcaaaaggccctcactaaagcaagcacgaatggcagacagaatgtaaaacgtgaaagggaccatccaagatctagttcacatcctgtccaagcaaaactgctttacatcatgtaagcagacctaagctcttaatcactgctacctactttaagacacttgatcaaatgaacataataacttaagagcaaatttctcgattcttacgtgaaattatgggagtgagttgggctttttaaagatttttctattgaactgcagctttcattatcaattactttccaatgccttcaataattttaaataccaatactgtaaacacacaggaaaaattattagcaatttataatcaatattttggtttttagacccatgtgctctccaattaggaataatagaatgaaaatcatactgacttaatcctttggtggaatatgtatgtatacttcaacttccccatgtgggtggactaagctctattatgtcacatgactattcacttcccacttcctgtgtcttgtttttctcttcactctctagatcccccttcttaaaaaaaatatttcctcttgccacctattcctattgtgctgagctattttaatgtttttatttatttgcttttacatagtgtatacttcacatcttcctgagacatacatgcaaactccatagtatacatggatccttttcaatgattagagcttaataaattgaacaaacttcacaacagtctaccgtttaattttgttcaatgtttccacaaagttttgcctctcagtttctacatatagatgtaataagtcgctgcccaccccatgccaaagtaaaatagatgttttatttttgcataatgaatttgattagagcgtagcatgagaaagttgtggaaaggaagattaggaatatatttgcagctaatattataaatatctgtatagtgtctttaatataatttctcaaagcttatttgacttaacaaatttaggcctggaatccaccagaagaattgagtttctatagctctgaaactatgtatttgaacctcctgtctaattctcagattgaaccttggggatgcataagttgtaatttaatgtgtgacttttatttttgtcaagcacaggtgccgcattctttaaatacataggaattaaaataaacgttgtcatgttttatttccagataaactttgcaaggttttgtgcctatgaaaattgctctgctgatctccaagtttctgcaaaagttggatttttgaagtaagtatagtttactctgtttttcatcaaaagagcaaaaagggtaaatgcatgtgggttctagcaacaggggatctcaccctcgaacgtcagcatcatttaaaaatttgctaaataataatgttttgctgtgagggactgagtgatgcttatatcactcattttacatgtaaaatgaatgatcaaatatatatatatatatatatatatatatatatatatatatgcactatcatcttttaaagtatgagagcatatgagcatccctattattttatgaagtctgctttaagtcttttgttgtaacttagaaggtatttcaggatttaactgtgccttgagatatcattatcacagtcataactatattttaacattttaaaggcctggtaacaagagtttagttggaaaaaataaactttactacacaatggttagtatactttatggctagaaaatgggttatgcaattcaaactgatatgcaaaatactatattttgacaaacttgaaaaagagtaaactaatttgttctaaattcatagagtaagaagaaaatacaatgtgcttagaatagcatctgtcatagaggaagaactaggtaaataggaatgtctactgttactttttaatggaaaaaaactgcaattatgtatcatgtagaggtttcctacattcaatttgctttgcacatctatagacaatgggaaatgaaaaaaggttaaggatacagagtgaccaggagcaggaatgagaaactagattagaaggtgggacataagcaaaccatgcaactatgtagttttatgtcaatttaactcaagaagagcattggggaaaaggaagtgccaatagacaatggctccacaagattggcctacaggcaagcttgtgacgaatttcttcattgactgattgatttgggaaggcttagccagtgtggacaagtgccgtccctgggctggctggtggtcctggattctacaagaaaacaggctgcacaaagtctctttttcatagcctctgcatcagctcctgcctcaaggttcttgtctggagttccctggatgatggactacaagctataagagaaaatgaatcctttcttccccaagttgattttggtcatgatgttttatcacagcaataggaatcttacctaagaaaatggagctctggtacatggctccttacttgaaaatcactctcaatatcacatttagaattccctctacacattagagatggcatagggatgagaaatgtaaattttacaggatgaacaaacattgagagtcattttattcaaggatcttaaaaacagtagaattcttctcagtcaggcaatgttagcatagccatgggtatctatagttcagaggcaaggagccctcccttgactggtaaaggaacttagtgcttacaagtgattcagttggctcactcaggtaattgagtacctgctttgtgtatcagagcatggtgtgactttgtgggtctattagtttgggaatatataattttccatttgagtattttttctaagatatgtaggtttttggtttatcaagagactttgataaaaagtcgttgtgcaggtgcatgtgcaaagagggagatttgcgaagccatagatgaagtgattccctgtgcttgcatttgggttctctgtatcttcctgctcctccttcattgctaatcttcatgagaaatgagatttcaaagtttacgagaaaatgtcactaagaacgatttcaacttattcaaataatagatagaatcattaattcattttttcttgtttcttgcaaagtaattgtctacttagcatttttaatcagaagtgtttttccaattaaatatcaagcctatgattttaaatagcatctggccaaacataaggtggtgtttcttaggatgtggtcctgagtcatgtccaggaaaatatccacaatgtctattggaaatgtgtatcctcagggcctagcaaacacagaagtggatgatcacagtcagctattggatgggtcacacggcccctaatggaggagctagagaaattacccaaggagctataggaaactgcaaccctataggtggaacaacaatataaactaaccagtacccgggagctcttgtctttagctgcatatgtatcaaaagatggcctagtcggccatcactgcaaagagaggcccattgaacttgcaaactttatatgccccagtacaggggaacgccagggccaaaaagggggagtgggtgggtaggggattgggggggtgggtatgggggacctttgggatagcattgaaaatgtaaatgaggaaaatacctaataaaaaaaaaactccacttccaggagctacagagaaggctcagtggttacgagcgcatgtacagttcttgcaggggacccaagttcacttcccaacatccacagtgggccactaagactgatactcatatatctgagtccatgtgggtatttgtgtttctaacacatatatgcaaacaaacccaaaaataaactcctcaaaaactaaaaaaaaaaaaaaaaggaaatgtgtatcctaaggcccagaaactgctcattcatagtcatcggatttaagaaagaaaccttcactatgaacagagctataagttgacttttaaagattgattgataattcatacatgcatatgtgtttcgattaaatatagccttgctgctcctccaactcctgcttcacctactgctatcctgtccaaatttcttctaaatttcaagtgtctcttctctactgttttttaattcatgtagttcactttgtgtacacagtgtgtgcttaggtgtaatctcatctactggaatgtgggtatctcctcaggggccacattattgaataaggcttattcctagcagccattgatttttccaagagctcctcaccttaggggcaggtcctggtgtgcctactttccccacccattcagggacttttgtctggcttgctctgtcttgtgcatgcagtcatagctgcagtcagatctcatgtgcaattgctttgttgtgtccagaaaacactgttctgtagtagttctccactgcctctggttcttaaagtgtttctgtgctccctcttcctggaagaagataatgtgatataggtgtctcatttgggactgagcaaactgccaggtattattctctgtaggttgaccagttgtgagtttctgtgttcaccacaatctactacaaaagaagcacctgggactaaggtcaagagatgtcctgatctatgggcataaagactcatgggtttttgtttttttgtttttgttttttgagaatttgttaaatactttgtccatttagcagaataatagcactggattctttgctaggtcttatgagacatcagcgtcttgggttgttggcctcagttgccaggcttaggttccatagtatgaagtggcccttatagcaaatcagaagatggttggttactcccatacacctgtgccactgttggcatctttgggcatggcttctcaaggtggtcacactcaagcctacttctgctattggtgctttatttctcctctctctctctctctctctctctctctctctctctctctatctctcgataacttctacaatcataagtttccatttggcctttcaatggttttttttagtgctagccctcctgtaccatttggcctttcaatgtttttttttagtgctagccctcctgtaccctttcctcttatccctgcctcatttcacccttcttactccattattttctacaagactttattactctgaaaccaggcaagcaatgcagtggtgactttcacgtgggaggtcaagctgatcagattcaacttggctcaactcttacttctactgctttacccaaaaggtcgccttaagagaagcctatgaacctcctctttccttgctataaaatagtagaaattatgtcttctctattggattttaaattttttaaaatgcacttattacaagtgattagctcaaaacctgatacctttgaaggttcaatgaaaggtgctactgtttttagaatcgtatacattccagtgcaaagcagtaggcaccagtacctttgcatcattttgaaaagttacaaactatttctatgaggctaatgataacttatttgggggatgtgcaaatgagagctcatctaattaagttttcagagccacggtgaaagcttttgactgtgttttgagtaagttattctgtgtcagacaaaaatacaacatctctgcatgtaggtgtcttctctcctttctcagtaaccgtctgcaaattggggccatatgttgtatgccttcttctggctgtaactctgctggcactaatggtattatgtgtcccagatctagaagcctgttttatgtaaatgcatctactccgtaaggaacatgaatttctgaagcctgcaataataaaccactcgggtttgacaagcagtgctgattcccactcactcctggttccattaggctgaggcctccttctatgtgtccaacctcctgggacagtgaaccaaccagaattcccacagaaacataacagtgagcaaacacgttatcataatcacaagaataataggtattaggcaacaagaaggaatctgcaatcagacctttcatatggatcaggaaataaatgaccttactcttcaatgcttcatgtttctagaattagtgataaaaatctcctctgactgctttcataacatttaggactacttttaacttcatgtaacaagaattttactaatcctgacttacagaaatatatatgtggcataatatttgcatggaaatggtagttgcgggtctgttatacagccagaaatcctgcatatatggttgtcttttatgttcttttggtttttttatttttgattataatattttagtgctaacattcccataaaggaagtggatgcaagaacaagagtgtgtttgtttgctttgtgtgtgtgtgtgtgtgtgtgtgtgtgtgtgtgtgtnnnnnnnnnnnnnnnnnnnntttcttttgaaagcttttcagaaaaaaattttttttctcatgcttactctaacttgacattcccccgagtctgtcactgcgcagggagaatggagtctttgtggtcatgttagccatcaggcttcattccccaaagctgaactcaatgctcatcttctgcaacatcaaagaaatgctgcccactgcctgagtaatctggggttctggtagcatcaagtggggaactctgagtagacagtaagttgtgaatggtacctggcaccatgcatttaactcttcaacaggctaatctaatacaactgtcctttgtaaaatcaaagcctgactgacctcccgaagcaggcgaagaatgaagttcatgcttcgatactaacgtccactcacttccgggccagcttcctaatccaagttccttttcatttctctccttgaacttttattcaacaaagtcagatgatagtaaagaaaaagaaaagaagatgaaattcaactttggactggaggccagttgctgaaggcttctcttttgtcagataattctgctgtgtgtctttgagcattaagctgtgctaaccattcacattttattttgctgcgttgtcttttccccccttgtttatttctttccttatttctttccttccttccttcctgcctgccttctttccttccttttttgtccctaccattctgatcaaaactaagtaatcttcagagaccaaatttattgcaccaagaaagaatatattgacaatactaaggttttgtgaatgtcttgtaaaatccagtcatgttcactgagagaaaatgtagaacctggtgtaacagctttctcgtttcctcattcacttattaagttatggttccatgtgtgcacagtacttgggcttgtgtcagttatgtggactctaagcagctttgtaaatttcaagcctgcattatgcatgttttcatgaagaatgaactgtaagtcccagggaagccgctggttcagtcatgccacccgtccagatgtgcagctggctctccttcatggtatgtaggacgctggctggtgtcttttcaatggcttcttgttaaagaagatgtatagaaaggtgtacttttaagaatcatggagttgggattgtggtaattgtgcaaaatagcttaaaatggaaactaaaccgggagtcttgctgacaacaggagcctggtgccgctctgatcggctgctgtctcagaagctggctgcggatgccacgctgccaccttctgttgcctgtcaaagtgccaacttctttcccaaaggtgttcagtgactaatgctttggttccaagccagaatattttataaatgtctatttctaagcagctcttgtacaagtcttaattaaactttaatgtcaagctgaagtttacttttagagtaccttgaaagtcccttcggtcgtaactggatgatagaacggtagggaaaaggcagcgtggctctcttctcaccatttaacaatcgctgccaaggagaagcctgctgactaagtccaaaggctcacaacatgagcaaaccacaccacctccttcgtgctggggtagctcatgaccactccgtcaagtacctccaggatgagatggtagccagggtctagaatgagtactttgttatttattattcatttgttgcacagcttctcaaatccaaggctcagaaaagagaattggttcacatagggtatcctttatttctctctcttcttttctacagggtgctacaggggaggttaaaggcttggggctggattactttttctacttctacttggattctaagggaaaagcctgtagcctctgccagctgagattaaggaccctctgttgatgtcagaatggatccaggcatgtcgatgcatacctgtaattacagcacgccagagcatgggatggaattacaagtacaaggcctgcctggcctacatatagcatgactctagtccacaaaaaccagacaacacaaaacaaaaaccaacagcaaagataatggattttagttgtctagtaataccacatgttgcttgttaatttgaaagttttcatcagtcatgtgggctgtatagcaggagccaccccaatggtttttataacgtgacagtttcaatttcttggaaaaaatgcactcagtctcagttgctcatctgtaccagtagtgcaaaagcgagaatggctagactcaataaaactttatttataaaaacaaaggaatgatttacgttcagacaggagtttccagatgcctactctgttggcctgcctgcgtttcctgtggcatccacttagtacagcattttttttctaggttaaaacacaccctcttatagtataatttgttatttactttgcataatgtataatcttgtatttaaaaaatgtttttacaagataaatagaaatacagggagaaaagataggaggaatgcaaagggatatatacacagaacaagtatatgtgtgtattcaatgtgagactattatagttctacatgggaaatgactgaaatcctacttaccactgactgggcaaagaagaagacaagtggctaactagggtggagcacagacttaagtgacaagcaatttgcaaacaccgattgaaactaatttcacaaagtttaaataaaagaaactacattcaaaatcgcagctaccaaggattacatctaattacatttgtatgagattccacactggctaaaactcgagtgtgggttccaggagtcagtggtcatttaggggggccccggtgaattgttcatgtatacagtgtctttccttggttggcacaccagtctctgacatgtattcagttaaccacagttaataagttgcatcttaggatgcttgcttccttctatacaaacagctttgaaatgggaaacgatttgaataacaggagcaaatctttaagtagtaagtttagtttcttagaaatgtacttagggttttaaatgaagaaagaggactctaagctacaactctgtttatccactctggtgttcagaagaataaataattttggaaagtaacttttcctttccactactgattttgccttagttaagagcatcgtttatgtggtcatttcaggagccttgctactgttgacatttttggatgtggactaaggtggaaatcacatgactacatagtgttggacattgagtttcttaatgagcgatttgaaatttttgtatcattgaggacaggcaagcatgctctctagctgaaattttacagaatagatattgaaaatattatgaaaatttcataagcctttaaaaatgaataatgtagccaatattttgggggcactttacttgcctcttgaatgtagcccagccattttaatctgatactcacttaaaacaacaacaacaacaacaacaacaacaataacaacaacaaaaaacccacagaactgtatttgttggttctgaaaaaaactctgctatccatagtccagcctcttgcttccatgaacatttagactagtggtgagagacaaccgtgatttgatattgtacaatgtgcttctcagtgtttcctgagagttagtgctattacgctgagtcttaagatcaagtacaagctatgctggtgcataatgaggagatgatgctcaggttggaggcgagcttaaaggaaatcagaaagcatcttgtgtttggcagctatttgaatgtagatgcagctaaaacaaagggatgccctgtgcagtgggaggtgaaacaagggtggacccttgagtgtcccagtgtcatgctgagaagcagggactcttctgtcacagtcactgccatgggcattgcttcattggcactgttggcacatggcagagtaaggggagagaatgaatgtaaaacagaaatcagaggcacaatccatgtagactccaaagtggtcagactgtattttcaaaaagatctcgaggagtagcaaacctgaatatcatatgaatagaaaagtgaacagcaatgcttttcctacccctggcaaaagtaggtgctcacctcctcttcaagggctcgtcattcaaagttgtttccagtgtatatctaatagttatttccagttgtttggaaatgggtcttctatctttttgggggaggtgggtaaatgaactttaacaacatgctttgtgatgaaacaacatagtggccgactcactgcctgggaccctcagttttgctcagtgattatgcatctctaagcatgactttaaatcagagatcttaatgtgttcttacgtatccttttacacatcctgttgttagacagtctccacctggttcctttggcacacgtcctgctccagtttgaattaattaatccattttttttctaattttggaattactagatgactctggggaaagcttagaaaatcaaaacatacagtaactgaaagttatgagggtttgttgtttttcctgcctggagaagacgacactgtgcaccacagagatgagcacagggcttaaaggtttggattattctagctctgtacgtttcagcattttcattatgctccaagttcctcatattctagggatttcatgggatgcgcttgatccaaaacttcactgaagagtcattttaccattattacagattgggtggccaaggcctagccaaactcattgaaattctatccctaaaggcaggatgcttttctaaggcctgtatgtctccagatctctagtgacctgcatattgtagttgccaggacgttgaagcatttctgtggtttagcctctaacttgaactaggtcttgtcagaggcaacctactcgaagaattcagtctccttcaaacaaatctctgtgccaccacctgtaggccagaggagttctatcgtttactttaaataaactcccccatgttgtcctcattctctcttttcctcagtttcccttctaatcttttggcttgagtagcatctagttcaatatcttttcaaagatgaaataaaaattgtgcaaaataatgaggaaaatgtaagtcaagcaagagggcattaaaacaaaagaccattttataataactaattaaaaatcaaacaggtaatagcatcaaacttttatttggggaaagctttttgaacatgtctgaaatatgagaaattgaaactttaaatctgtttgtatgaggtcatcccatggttgttattctaagtttatagtttatatttatgaatattttatatgtggatggagaatttttacttccattccttaatttttaggccatatgaaaataaaacctatcttgctgttgggagcatgaagaccataatgctaaacgtgtccttgttcaacgctggcgatgatgcttacgaaaccactctgaatgtccaactccccacaggcctttatttcattaagatcttagacctggtaagttctagaaactacagtggtaggaggcactcaagattaaagacaaatgtaaatgccatagctactccactcatttagtatagacaactgaagttttcctcttaatgtctagacatcactcaatctcccattattttgagatgttcttcctgcccttgagacacaagtttgttgggatctaaggggaaaggtgtctgcttccttccttccagttttaggagaggattctttgagtgccacaaattcttccctgtttttaagatgctgatgatgctcatctcagagcaatagtcttccttcgtgctaagctaagtacccagaattcctgcaccacactttaagccatggttctcagccttcatcctgtactccagaactattaatcttcctccgggttgaaatcctgcttttcaagccaggtcctggagtagacatgtatctgtgtgtactccatgcatgtgtttatggcactcattattaaattattcagtgagttgttagaaggcttgagtcacaaagaggagagccccagggatagttgccttgagatctccctatcctctagtcagtaaaccccagcaacattcaccttttaaaagtagattattgacccctttctctagattaccaagaagctatttcaaaaggggagggtaaattctatggactcagagcctatactttaatatatttctactgtgattgtacttgctaaaattaaatactttaaacacattacagatacagacagaagaaaataggggctttgtggcttccttattaggaattccctcttaaatatgagagttcacatccaggagctgtttatagagaactcacacgggtattagtattgtgtattgcctatgcacatacatttgtatcacttactataattcccaggctaagcagaaaattgtttcctaagaaaatatttctacaatggttgtcttttaaaaagaaaaaaaaaactgcctcaaatatatttttatcaatttctaattctctttctccccaaactaattgttttatctttttgttttgttttgttttgtttttttcctttaggaagagaaacaaataaactgcgaagtgactgagagctcaggcatagtgaagcttgcctgcagcctaggttacatatatgtggatcgcctctcaagggtaagcatttaacattttcatttgctacttggaatgtgtttttctacctttatgctgcattaaaaaatgtttctttttttaaacttagttatgaaactaagtgagatcaacttgtcctggagtctgatctttgtatttatagtcttggcaatgttcattgttcagggtgggggcgggcggggctggcagggagctgtggagtgagcagagaacctgtttatgtcaagacaggaaaatcaatgtgtcaatcagaatttgttttgcctgcttactctttcccaacaccccaaccccccaccccaggtggccctgtctgccaggcatgttacctctgctacacaaaaaggtgtttttggcaagcgtcctcaaccaagttgtcaaagcatctttaatggtgtccgtctgggcctgccaggctttacactcagaggaggctttgtttctggaagtgatgcattgaatctctcacaccttaaacccaacagtttctatgtgaggtagagctcctgccatacctagaatattccagttttctttaagagatttaaaaaaaaaaaagaactataaaaatgtatttcaggttaaaaactggctctttcctctctcttttccagatagacattagctttctcctggatgtgagctcactcagcagggcacatgaggacctcagcatcagtgtgcatgcctcctggtatggttctgtgtgcaaagaagcagctgacacaaaggacaggcgccattctggtgatggctttaagggatccatggcgccctgttttgataattgtctataaatcacaacagtataaataatgagagcaatttctaccaactcttccctttaccgccgtttcctcttccctccaacactactggatagtaatagctcttttaagtcttcatagtttgcagtaagtgctctctgatgctgaggtttcatgggcctttctatgttttacagtgaaaacgagggcgaattggaccaagtgagggacaacagagtgaccttaacgatacctctaaggtatgaggttatgctgactgttcatgggtaagtacagacggaggcctcccaattgagatggttctcctactgttgttttttcttatgttaatggaggaagcctgttggaacatgtctaagtggaaaggatactgtgtccccgtgattgcctctaaatacagcagcttgattggtgattcattattttaatccgctctgtaatctgctctgatgctacatcaaactcaaggccagctgctagagatttttgtactggaagagccccaatatgctttcagtgggccatggtcatccttcagctcacaacggaggggctcagagttatgtagtgtgcagcttgtggcatagtgcccagtggccgtggtagggagtgacacaaaggactgtgcacttgactaaaccgcttctctgcagaacctacatcctaaccgtgtggcaaatgactaagacatgagcgttttctcttttgaactctcagagtgctctgcagtaagaactctggggccagcttgatggtttcctggtggtcttagtaatttctgagtagatccttctcagatagaaaatgtgtggctagagtctgaaattaaggaatgatgaaatctctagcacacccctggcaagtgttcaaacttgaagtttgtggtttagacatgttttgttgtttctctctgtgtggtccagactggccagcaatgtgtgcagaacagaaggatgttcttggacttttgacggttattctggctctgcatcctgagtgttaggcttatacatatgtaccaccacgcccaataatcattacatcggtgttttgtacaatatattttcatcatattcctaatttttcccaaatctattctacctccctgaatgcttccaaatttatgtcatgtttaaagaaaataacccacaaattccaatttatgatgctcacacactcttgagtgtggtgccatccactgaagtgttttcagacccccccccccatcgcacatacgaagaatactgactttccctccctagaaagccttagctctccacagctttttggttaggggtgggcactcacaggtcctttccacttcctactagatgcatgcatacatttccaacacactagaagataggaattacagaacaaaatgatacatgaattttatgtattgctctaaaaataacgtattccttcatcattttaaccatctatgaggaaggcattcaactgtatttaaatgtcagtttctataactgatagaattcagtatcagttttatgaaggagcaagagagtgttccttctcagaaaagcaggctgtgagagtcagtggtggagaacatcaaagtttattattggtttgcattgagcatacaccttacttctttccatggaatgagcacctctgttttccctgttagtaatcgggacaaagataacaagcattaaactgtgcatgtatgtgttgttgaattatttctaatagctttcctgcctcctagatccctaattgggaattatctctttttagttgctgagtatggactataaatgacttgtgggacagggacttcccctgacctgtactttttttgctgcttgctgctccctacattagtctaattgcaagacttaaaaaaaaaaagttgaaaaacttaactcctagcaaactcttgcctgtagaagtcagtgtttggcttgttgaccaggcttttgcactcccacagtcatcagcaaataattaacaggttagattgagctaccacacctctgcaaagagaaggcttcagctaagtttttttcaagtttgcatgaattgtttcagggccaaaaaaagtgcaaatggaaaccagcctgcaggtgtggggaaggcaggcaagtgtatatattggcctgaataggcatggctacctggccttcctgttacatcagtcgttagagcttctatctgaccaggaaaccaaaaggtttctgcgttaccttgtaaatgtgctgtactctgcctctaagatggactgcacaggccctcatcagaagagcaggacattcaagttgcccttgttcccatcaggcttgtgaacccaacttcatttgtgtatggatctagcgaagaaaacgagccagaaacatgcatggccgagaagctgaacctcactttccatgtaagcaaagctgattttgttgatgttggtagcaggtgggaattcctatcctcacagtgtccttctgcctccgtgaacatggctggctgcggggctgcagtactgtgattgggccctttcctttttaggctactattgtttttcccatttctcttgtcccaaactttctaagtaagatatgtgaatacctcaagcacgtagagtttggaaatcccctaacccttctggagatgcattcaaggcagataagccaaaggacaacatggttggaggcaaatcaggaaatctagagttggttcagatgctttaacaggcccaacattaccaagtcatcgaagcatttatcttccctttcttgaggaccaacataattagtttgccttctgagcttcaggattaggaaagatactaatatttctttatgatgatagtattaaatattttttagttcaaaaagtactatcctcatatacaagtacatacataagtaccaatataaaactcatttttgaaaatttagctgttaagcagaaatttggctgtgtcacagatgataagaagtaatgtttacaaaaaatatttgttttaagcaaaaacactgttctagccttgagtattatagcaatgtatagattgcaagtcttgattagatagtgaaagtgccagtgctctcctttactagcgcaagcaatttcttacccaatatggctggtaagaaatgcaaaccaggcacagactggaagagctacagtaaaattatgtcaagtttattggaagcaattcaattttttatacatttattggcaatggaatataatggcaattgacaggatcaatgctatggcagttgccagaatacaatgatgtttaccagctacctaggatacacaagaataatgtctaagatcaattgtctggtcaagttctaaggaacacagagaaactcagatggcttgaacacttcacttcctgaggcagttcctctgtttctcagcaattgagggacacagtgctctaaggagccagagacttaacctgaaaaacctatgatacatttctcttgaggcatttagaccaggacaacaccatgatttcctgcaggagaggagataatgctttcatgatgggcattagaagcacttatggtgcctacagaagcgacaaattcccagggcttctcccagatcctcaaaaaataatggccttgaattgaaatcctatcacatctacatcacctaagttttttttaatcattagaaatgctcatgagatctcgggagtgttttgataaactaagacagaaaccaagtcatactgtaatgccagccattcattactttgcaatcactacttaaatatttgtaattaaagtgtgatggagtcaaagcaaaacggagactcttgcagctctaacacgtgttgagagtatgctcaggccagaagggtcctcagcggtctactaccgttgggatgagacactgtacgtagtggcttgtcggtagttccgtgttctagtcacgtattcctctgtccaagctgctatgacccagcagctctcccaggctcagggccacccttggtcacccatgtcatctgcattctgacttcaggtctgtctgtcatcctttttcatctaggtccggtggcacacctttttcatgatttgtattggttttataattaagctcctgagcaggtagacttttgtctcaacactccccccctttcacagatctgtaatctccacacttagggactaaaataccatcacctagatagcctttgaggattaagaacatgttgtgttttcttaaagccaagtaatatgtcatttcttaagttttaaacattatagcatcataattaacctgattaaaaatagacatctggtcaacctcacagtagatcctttaaatatataattttaaatagacattaacctctctttggttttgtattttgagacagggtctcttatgtagctcaagatgacctcaaacttgtcagctcttatttaaaactggttttgccataaaatacagtcattaaaaacacacacacacaaataaccaaaaaaaaaaaaaaacaaaacctcaaaataatgtgaattggaactgattaaactagaacaaaattttactatggttattctgtctgctttgctatgtatctgccaactacacaccctttactggctggtaaatgctcgcctcggctcagtgatttctgtgtttgtaattatgaaaaaaaaaaaaaaagcttttaaaattcttttctttctttttcaggttataaacactgggattagcatggctccaaatgttagtgtgaaaataatggtaccaaattcttttctccctcaagatgataagttgttcaacgttttggatgtccaggtaacagtgtgttccccctgtctgacctagcctaagtgtgtgttaaatactagacctgctgtgaagctgcatagtcctgctgaccccagtcacacccggtctcagggactgtctgtgcattaacagaggggactttgaatattttttttctacactgtagaccagaggtggcacctgcattgacatatacaatcagaaagcctggttcttccttctttattaactattttatatgactttcttcgggacatgaacccacagaagtcatgtagtcagtaaaatattccctaaagcttgaagccagtgcagcaagagcagagaacgaagccctctttaaggaaacatttgaatcatttcttatgcgagtgtttagtgtcttataaagtttttgtttgttttgttttgttttgttttgttttacctctgagtatcaagaaacagcaatcacaaaaaaaaaaaaactactatatgagtttggaatctttttttgaaaatactttgattccagatttaaatgctaggatgtataattgtaatatattttgttttgtggtttatgttttatgtaaccaaaaagaatttaactttaggctaatgtttatctgtcatttttttactcatttctgtaaacttggaccatgttgtcgaagtaggactggctataatttgggtggggttttaattgtgggtttgctagagattttcttatattttagtaaaaatattcaatcgaaacttctgaaaccattttgtattagctctgttcaaagagacatgatccttttcttgttctctatctttagacaactacagggcaatgccattttaaacactatggaagagagtgtacatttgcacagcaaaaaggcatagcggggacgttgaccgatatagtcaaattcctatcaaagactgataagagactcctggtgagtttccattcttcagatgtgcatttctgtcttgctacaaagaactaaaacattcaaaaccaaattcaacaggggtttgtgctgccaggagaatgctaagagctgtaaacctaggtgatattccctctagtaaggaaatagcatgatggagtgctgagatgggcccaggattaagtgtgtgctataggggttcattacctagcagttaccacccatgtaccacccagacattattccattaccctcttgacaccaagttacccgggcagccatatttatagcacaagcttctcattttcccaatttagtgactttatgagagaaaatggagaagttgtgcaacaacaaaccagagcacataacgtagggaagagactctaattatgagcatcatccttttcatcctgtcccagaatgttcagtcctaagatgaaacacgtgctacacattgaacacactgtgtaacttataaaacaagaatgtttattgtattgaaggaaagatgattataaaaaggacagctttctaaatacaataaagatacttaaaaatacttcctcacattcaattgtgtgagtgtgtacaggaaagtatgtctctgtatgcctagagaagtcagaggtcaacttgcaggagatagcactcttcttacatcctgtaaggatttgaacacaggtcttcacgtttagcagcaagtaattttacctgctgaagatccatcttgctggcacactaagaagattttagatctatgtgaaatgtgttttacattttaaaattcatatatatatgaattatatatgactatattatatatattatatatgaatatatatgaattttaaaatataaaatacatttcacaggtgtcaactgccctctcccctctgctaacttgtttggggcagattttccttgttgttttgaggctgcttctcaaaaattctttctcccatcttgtggtaggaacagtgggattataagagcatttatatcagatatttacatggcatcattgcgtggcaatcattctatccactgaaccatcttctccagctgcttattttttaagtgtaaaaaattttaatgccagtgcttttaattcttttcaagtattgcatgaaagctgatcaacactgtttagatttcttatgcaatttcggaaaaatggaaagtgggaaggaagccagcgttcatattcagctggagggcaggccatccatcttggaaatggtgagtctgaaatcatatagataactttgtgatgtggatctataaagccagttatttttacatagacaggatattatagaaacagttttaaaaattacatagataagaatacagcttgagaataaaacccaaatctcttttttttttttttaccacactacctgacagagatgaactatagcatccttgggtttcattcagaaatcatgcaactttctgtgaacttaattaaatagaagttgactatcctatcagctcacatcatcttaagtcaccaggtctcaatggctgtaatgctgcaaccctttaatacagttcttatgttatgatagtatctcccaatcataaaattattttattgctacttaataactataaatttgctactgttatgaattgtaatgtaaatatatgatactcagggtatctgatacaaggctcctaaaagggttgtggcacataggttgagaaccactgccttaaatcatcctttaaaatgtgctatttaaaaactaaaaccaaggaataaaattaaaatctgatttcagagaaaaccaaatggaaacatcaaacagtatcaactaaacctgggtgtggtggctcatgcctatgaccccagcactctggaagtcttaagattatctggactatatagtgagttcaaggccctcttgaatttgagatccaatctcaaattaaaaaaaaaaactataacaaaattctgtaacaaaattacatttttataaataacaaactttaaaacttcaaatagaaaaggaattaagagtattttggatttttttcctctaaagagcacattttacaaagagctcccagatgacaggagaaaactgaaaacactggctcagtttccccttctggtcagtgtggacaatgtcagtgaccagtgtagacaaggccagccaatggagttgcaaactgagacaaattttgttcacatattttagttgacccttgcccatgatagctaaaagaaatggctctactacatgttcaatagcatttttgttaaattataacacagtggtcaaaggaatattcatcagatagcagagagagagagagatccattcatcttagcttcagatatgcataaagtcctgaggccagcatcaggactgcctctcatatgccccaagtttctccacagaggctctactgacacagtggacagaaaattttgttgtcagacatccatgcacactgcaagacatttaagagtgccctacaccccaagtggttcctaccactgttcacatctctacagttaaagatgtccccagacattacatactgtccctggaggataagtcttcctgttgaaagaatgctgtaggcctaggtgaagtttggaatttctagctctaaagacaatctttacccagtagattttagcatttgagggaaaatagatctccttaagaatctgtagtcaaggaccaaggtgtagctcaattgggataatgcttgcctaacatccacaaagccctgagatcaatccccagacctgagcactggtgtgaactaggtatgtagtgatgtacacctgtaattagattatagtacgattagtaaatcaaggtcactcaactaacagcctgggctccacgtgatttgctttgaaagaaagagagaaaatagaagaaaaagaaagaaaaaaagtaagataggggggagaaggaggaaggaaggaaggaaggaaggaaggaaggaaggaaggaaggaaggaaggggnnnnnnnnnnnnnnnnnnnnnnnnnnnnnnnnnnnnnnnnnnnnnngaaggaaggaaggaaggaaggggaagggaaagaaagaaagagagagagagaaagagagagaaagaaagagaaaatagaagaaaaaagagaaagtaagagggggagaaggaggaaggaaggaaggggaagggagagagagagagagggagagagggagggagagagagagagagggagagagaaagagagagagagagagagagagagagagaaagaaggaaagaaagaaagaaagagtatcattatcaaaattgctcagtggttgaaacacttccctcaaacaagatgaccagcagcactgtggtaggaaaaccacctacaataagccctcatctacctccacatgtgcataaaagtgaataatagtactatttttttaattatatgtaagtactatgttcttatccaccccctacaaatgcacctcccatgaaattgaggatcatgcttatgagtccaaagaaagccattataatttcagaaagttacagaaattttagatagcaaactggcatttctattgacatgtcttgtgcaatgaaatgtgaatcaaactgtggatggtttcttttcaaaacaggatgagacctcatcactcaagtttgaaataaaagcaacagcttttccagagccacacccaaaagttattgaactaaataaagatgagaacgtggcccatgtaagatctgttctcttaggggctacatgaagactgtatgggaactagttagagggtgtttattagtggtgccttcttgggatctgagtcaagagtcagcctgtcaccaggccatagaggacttttaactccttacccagaggtagcattttccacaactgatgggaagtatagagagagctctctggagccgcgatttggtagtggtgagaatggaaaggatgggaagagctgtagagcattccactcactgtttctgctaaacagttgccagggcttggtaaggctgagactagagcagggcagggtgaacagttctgatctctgtggaggcctgggaggcttttctcaagggaaatgtcagcagtgctatgtctgagtgcgtgtttcttttccctaatttgtgcaggttttcttggaagggctccatcatcaaagacccaaacgacatttcaccatcattattattaccatcagcttgctacttggacttattgtacttttattaatttcatgtgttatgtggaaggtaatcctttaataattatcaatttcatgtgttacatggacactatgcctttcatagttaccaatagtacactactcaaaatgcctttattgtctcaaagccaattatttcaatatttactattcttgtttcccattgctatctcaatgtttactactgatcacctatttattctaacttcactacaagagtccgtttgggaaaatgtgaataacgtcaaatatcaatgtaatggtgtcttaatcagggtttctattccctcacaaacatcatgaccaagaaataagttggggaggaaagggtttatttgacttacatttccatactgctgttcatcaccaaggaagtcaggactggagctcaaacaggtcaggaagcagaagcagaagcagaagccatggagggatgttccttactggcttgcttcccctggcttgctcagtctgctctcttatagaaccaaaactaccagcccagaggtggtcccacccacaaggcacctttcccccttgatcactaattgagaaaatgccttacagttggatctcatggaggcatttcctcaactgaagctcctttctctgtgataactccagctgtgtcaagttgacacaaaaccagccagtacagatggggagtgcatatatatgacagagaagtcctatgttgttcatgctgcatggtccatgctgattatcactgtttacagctgtttccagagctaggcaaacatgggcaaagttaaaagtattgtatactgattagatatttgatgtgactcttatgggttcagaactatacacttgtcatctaatctgttttcaggctggattctttaaaagacagtacaaatctatcctacaagaagaaaacaggagagacagctggagttatgtcaacagcaaaagcaatgatgactgaagacttctacactgagagaactgaaaaactcaggttaggaaaaagaaatcctgttcagaagacccgtcagaatttcttctttttttccatgtgcttatgattttgtgacatactcttagtgcaggggaaatcttcaagaaagaagctacccaaaggtggcttgtcagcttcggtggatgagtgaagcaaaacactaaagctctggatgtaccggagaggtgacctgtttaagacaacttaaagctagagagaatccagactcagcagggccgacttaaagggaatgatttttcaacatcactgatgaagtggctcatctcagtgaaatggatgccatgatgtggaaacttgttggcttcaaatacttttgatttatcttcaaactatgatcatgatctttgaattcactgagactctttcaaatggctgttccaagattgtctaatggataagtcattttttattagatattttctttatttacatttcaaatgttatcccctttcctagtttccactccaaaaatcccctatcctctcccctgtcccctgctccccaatcgacccactcccgcttcctggccaaggcgttcccctatactggggaatagaaccttcacaggaccaagggcctctcctcctattgacagagcacagggtccccaatgaaggagttagagaaaatacccaaggagctgaaggggtttgcagccccataggaggaacaacaatatgaactaaccagtaaccccagagcttcttgggactaaaccaccaaccaaagaaaacacacggagagacgcatggctctagctggatcaatcattttaaagcagaggacctgaagactgctcttggtggtgctgcatccctgggctgtgtccctacagcccttttactctgcagataggaactgtaaaatcctaaagaacaaaatccgtttgcagcaggatggcttctggggaaatggtcagctgcggactcttgtgtgtatgtacatatacttttttaaaggataaaaatctcaatctacttctttattaagaacacccaggaatagtttgcatcttctaagcttcacctttaataccaattcttaagaattttatcctcatagcagattataaatatcgcactttagctgatacacactgatacaacatgaactgcagctcactgatgatcgaaaattgtgtgaagagagatttaggaaccaatatttcataaaacattcactgcatcaaattatgcaaacatgagtatctgctaggatattgttgtttctcttggtctggttgaatatacataaactaggactctaaaacaccacattctgtcatagaaatggagacacaaaaatcatagttggaactgcaaatcactgatcaagtttgtgtgcagtggcatcaaaattcccatgcgataatgcatgcttgatgttgttgaacaagatactattttaaaatgaaatagcttctacctgggtttcacataatttgtctgtaattacaatcatttttgtagtatttatttcatatatgtagtttgataaatgtaagttttcatttgaatctgttatgtgtaagcaagctaaggccagactttgaacatgtgctgggtaaaaggggcagccttcagtgttgtgaagaaagatcgctttacaggaagggtttgatgccagctggcccttcctcagatttcctgacttgtgaggatggcttgttcacaagcctctggctggagccgtggagggaggttttgagtgctgaaacttgagcatagagcatcagatctgggtgagcagaaaccatatttaattagatgcttatatttttaagggatgcttttttgtgtaaaaggtttaagttgatggttttcttataaaaattcaagtagttatttcatgaggatgccaaagttaatagatgagaaatcaatatcattttagacctaccgtttcaaggaatggtctctgaggagagttaaatgtggatcattgcactgaaaaccgactcctgcctttcaggtacaaaagaacgtagctacctcctgggccacattttgcccaattagaaagaaatatttttatatttattaataaaacttagaattttatataagctttaaaatgtagttatttcaaaagatgctgttatgggatgggtagtagaatagtagcctaagaggaaagaatgttttttaagtgggtgttcgtggttatgttactatctcactgtgaagtctgagattttacagaagttttgttttactaggttacaggagatactaaagaattatcttcaacagtattgagagagcacaatgttgttaaaattagatctaacaaacaccttccaaaaatcaaaactttgatttttttcattaatttcatattttttgattttcaaatacctggctactattttaattatattaaaatattttaattgcattaaagtagatactttaattatattaaatagatagcttcattaaaatgtgttgcagtaaatctctccaacccaaatatgccttggcaatgaaaacacaacacagttaatatgattgcatgctgtgcgcctagattgggcagatctactgctacactactgtcttccacagcttatgagaccccttagaacttgcggtttctccaggccatgtgcttctgctctgcttcacttcatcttcctccccctctgcatcctctccctcttccattttctccttcttttctctccctaccttcggctccgccttcccttttatctgcccaaatatcagctctcctttattttacaaattaaggtgggaatcaggtttacaggaaatcacctgagtgctgactcattccttgttcacaaccgctcatgggagaacagaattaacatcaaatataattagccccagggctatcctcaacatttacccctttctgtccaattaaaagactattttatctcagatataattgaacataacaattattattttgtaatttataaagtacaggagacctaacacccagtccatcatctttgttaattaaataaaaatctctgtcatctatccttacttaaaagactatagttctgcacctggctagttctgcatctgaaaaccatcctctcaaatctattcctctcaaagtgaaaagcctgggctcgcctgagactatgtagtttttcaacctcaacataaatccaagaatgactgatattaactgaaaatatataggaagcctaacatagcttccaaaatttagataatttgttgagaccactggtcacttggacagtcccttacttcaacagggtggagctttgatcttcaggctactggccttagtcatctgacaagacttagagaaacaagaatattaaggactagcctactgtctcggcagaatcaagctgtcctaacctgtagttgtgtcctttctttggacagtattatatctgtagatgaaatgagccaattcttgcctagtgactttcaccacaactagagtaactcaaagatgctcagtttcttctttgaatccaagacagggaaagctgtcaggagcagactagtctcaacaacaagtgaataaataacatcaaacttcacattctgtggacttctgatgtttttggaaaaccaattatctatatgaagtaatctgaactgttctctgaacctctctcagccatttctgattaaaataactgaaaacaccctaacaataaactcagagccaagaatttcctatctgacccttaactcacaggcttaaacatctcagctctgtttatcataacagcaattgaaggactgggtctaagccttgtacttcaaaatttttagtatcaaagacaacctataataaccacccgcagccgcaaagcttagggaactgggatgatgaatcttcataacttcttcaagctgatatgggcgttgagatatttttgaaggaagggggaagaatagggaaagggggagttagttggccttaggaaggccccaccatgattgtattagtttctgatgtctctgtcctgactggatccggatgaaaaaccaagatatcagttcaggcaagtcagttcagcatgtctgatgatgaaattcaccaaggctgtatattctgtaatatataaatctcaaaaaaaaaatttagtatcatcaatataacctttttgtttgattctcaggaatctagttctcagggggtctccttctatcaaatctgatccatataactctagaatgtgtaaataccttaatcaccttttccaaaaacacaaagataaaacctttccccaaatcagcatatccttcagctggtaaccaggaaaacctgtaacttgcgctctgtcccagaggaacaataaaacaaccacaacacacaaaatcacacacattttagcctatttaggcctttctaatttgtcatgtcaggatattaacccaaaatttccatggagtccacgttagacagaatatgaatctcttgcagactttattataccatcttacaacaattgattcatacttctattttcctttccttttcctttcctctcctctttcctttcctctcctctttccttttctttctatacctggttttaagaagcagtttgtcaaaccaggatttaaacccaaaattcccgtgcagcccacattagacagaatatgagtatcctgtaagacttattaaagcaatatatctttataccatctttaaagcaattaattcaaacttctactaatacctgttataccgtctatctgttgtgctctctaccaggagccacagacatttatttaattaatacctattataacatgtatctgttatgctctctacctggagacatagactttattaattaatacttgttcatagcaggcaattatcactgctgtctctacttggagtcagtaactaataatccctatatagttccaaatcacaggtaaaatttcccatctttaagtactatacctgcttataagaggcagcttgacaaaccaggatttaaactaaaaactccagtggagcccatgttagacagaatatgagtatcctgtaagacttactagagcaatatatcgttatactatctttaagtatcaaaaggttatatttttctctttatatcaatgagttatttggtctggagacctttgtacctttgcctcccaattttttattcatggggagaagctgaatgtaaaaagacccctgttgtctgtgtccctgtttggaagtgggggaggcagggtagggaacaaaggacatagggaagcaaacagggaaggctctctctggtgtagatgcttctctgctgttctctgtaggcccctcaaatcaaattcatactgctacagcctaggtcactgcccaagcccctttcaggtgttggggggcagtgaatttttatcttagttagttgagttcaaatcaatatgttgggcgccattttgttgtgttaaatctccatcccaaataagccccggcaatgaaagcatgatttaattcatatgcttacaagctgtgcacctagattgggcagatctaccactacactaccatcttccacagtttatgagaccccttagaacctgtggtttctccaggccatgtgcttctgctctgcttcacttcatcttcctcctcctctgcatcctctccctcttccattttctccttcttttctctgccccaccttcccttttatctgcccaatcatcagctctcctttgttttacaaattaaggtggaatcaagtttacagacaatcacctgaatgctgactcattccttgttcacaaccactcacaggagaacagaattaacatcaaatataattagccccagggctatccacaacaaaaatgcattttctatttgtatatatcttgcatgccagattccttcataataaatttctgcttacatacttctttcatatgcaatcacatgctactttgcaatcattcatttcttccaggcttcctccatagagcctgatcagtcttgggtgcagcctataaggaataacaagggtttgatgatttcatttctgggccactatgatttttcacatacctcacaagtgtggtgcataaatcacacatacagattggcatatactcctagctgagccacaagccagcaaggacctaaaacaccaacatctgtgaccattccaaagcactcttaaccacctttcctgcctggttaatatccgctagtgcctctgtgaagagacagttacttaagaacaccccacctagcagaggaccctgtccctccctcccagcacacttcagcctgctgagacattaagcttgctaagattgagtatgagtattgagtttctacaactttatacccattgctcattcttgttgatatatatgtacagtgtgtggaatgcattataaagatctaacagtcaactccattactttgtgtgctgaattaaataaaaaaggattttgataaaagcaaactgttcaacagattattacatgatattagaacccagtttggtcgtggtggtgggatgggagcagggctagagagtatggcactacattaaccttataaggtttaagaatatcctcaaagacaaacaatgtaaattgtcaacatgtctgtatcatttatacaaaataatgtttgcaatgccagcataaatgctcaggtttgtatttattgagaggtggtgcatatgtatttatacaatgtgctaactttctggcttttaatcttctgcttgggcttaggaggcagaacgcccttattatattaatagtgttgcatctagtattctgcacagaaagtcataaaatagttgggcttacctaatgtgaacctctgatgcagcttccattaagtcaccatctacattccacggaaacccgtgttctgaagcagttgtatggtttccaccctcctcctgtgggctgtatccattgctattactctttgggtgaatttttacttcttcaatgatataagtctccacaaagggaaaattgaactaaatataccaaaaaaaaaaaaaaaaaaaaacaaaaaaaagcatgatgcttcatgatggcccctattagaattaagtttcatcatcattctgacatctttatagctttgaaactttaaccagatagccccaggttttctgaaaaaggaccctctttccatgcccattcatctctactgtatgacagtttgtacctgtgaagaatttcccaccagaatgatgtcataatttctagttaaagacagactcttcagttgatctcactgacttcattacaatcttagttatctgatatgaaacaaactctagcacaagtttcacccttggaattcaatacaggagaacttgaatctaaatttataaaaattaaataggaagtacagaagagaaaggaaagaggcaatcaaacatggttttcccaggtgcttacctgccatcttaacaaacaaatggacacaaggtacaggatagtaattagccatcgagaatgttcaggtaatgttcaagttgttctttttcttctttgccaaaggatattacccaggtggaggaacagcaatgaatcctcaattatatctataaagaccctttatacaaatagagtacagggcaaaggtaacaagggctaagactgaatatctggggtggggagcagacataatttagccaatatcagccagccttggaaatttatgtaaaaacatagtctatgaaacgaatgaaaggtttacactcaacatgggagctctaacatagttaaagcgtgcaagtagtttcatggagagccaggctggtgagagttgctaagagctgaagtgagcatggactccacattttaactcagcttattatatattgtaagctgtagtgtctcctagacctttgctctgtgtataaaataagggtttgggggaaaatactaacccttaatttgctttaaacagctttttatattttgtgcttcattgaggtttgtatgcagaagggggaggggaaactatgttcactaagggataatcccaaagccattattttaaaatatgaaatgatcaatgattattaactatattcacaatacaacatttggctatcttaactactttgaagaacccaattacaaaatgtttcaacatactttgtatgccctgcccaagaattcctatgttgaagtcctaatcttgaatgtctcagaacataactgcttttgaagataaggcttctaaagatgtagttatattaaacacatttctgggtggcagagcctaattggaaactagtgtgaaaatatagcctatataatgagtgattatgcagtgatttctcttaagtaagaggcagatactgagaggtttgcacccaatgtgggagccaattgtttctttttggggtggtagaaggttgagagctttgaaaaataccagggattcacatgtcccaggggacagccacgtgaaaatacacttagaggacaaacatgtcccaaagggataatggcctcatgagatagtgaaacagttgacaccttcctcaagtcgtagctggaacttgcagtgagaaaatggcttcccaagaaccatgagttcatgttgaggaaatggaaagctgcccttgggaaagtggagaaatcagctattttaggaaaattcttccaagagaaactacaaaagacaagacaggctaaagatacacaagaggccattatagtgagtaaggtttgaatttaagaagagggagagatacaaaataagaaccaacagaagcagttgatgtaatgttgtgagaaaatgagaaggggaatttcaggaaaactgcaatatgaggggagatgctgttacctgaagaaaggggtaaagtcaaggtcagccatgggcccatcagactgggagacctgggttgtttacaaactttacagtataagagaaggacagaggttctgcaaatctgaagacctgatcagacccttgcatgggtatgtgcttagaagaaggcaagcaattagaataatgggaacaaagggaccacacagaagagaggatcctcagaagatgggagagtgaatttaaaagctttaaaaccacttgccaaaggtggtcatggagaagaagaaatgtggggaaagagaagagctagcaagagggtgcagataaaagggtcccaaagcgtagttttatcctgttttactgagttgggagtcactgtaaaaacagtgaggttatcttcaatctgttcgacagctgttcacaaacactgacattccagcaataaaaacacggctcagagaatgaaatgctaaaacaattcagaatttctttccttcctacataccagcactggctgcagattcactgcacagtggagaatccttcagtaactaagatatatgtagactttcttatatggcaaactggtttttttaatgcattatatataattcacattcccatgtttattattcactgaaatgattatatgaattagatggtattataaataccagattattgtagttctttattgtagtgtggaattatgagacaaacatgggggcctggggactggagtgatggctcagctcttaagaattcttactgcccttccagaggactcaaggatcattctcagtacaaatgtgaatcagctctcacaaccacctgtaactctagctcaagaagatccaactccctcttgtggctcccacaggcacacacagacacacaaaatcagtttgttctctctctctctctctctctctctctctctctctctnnnnnnnnnnnnnnnnnnnnnnnnnnnnnnnnnnnnnnnnnnnnnnnnnnnnnnnnnnnnnnnnnnnnnnnnnnnnnnnnnnnnnnnnnnnnnnnnnnnnnnnnnnnnnnnnnnnattcatgtcccataacagaagaatggatacatacaatgtggtgtgtttacacaatggaatactactcagctattaaaaatgacgacttcatgaactttgtaggtaaatggatggaactagaaaatatcatcctgagtgaggtagcccagacccaaaaggacatacatggtatgtactcaatgataagtggatattagccccaaagcccagaatgcccacaacacaactcaaagaccatat

SEQ ID NO: 859 - DNA, 3333 bp, Mus musculus
ggccaaccgtcgcatcctgtgcaactctggtcagtggccgttttgtgttgaatgttctccaccaagagcgcatggctgcggaagcgaggtgcagaccgaggtcccgagggatcgccctccgggaagcggtgatgctgttgttgtacttcggggtgccaaccgggcactcctacaacctggacccggagaatgcactgctgtaccagggcccctccggcacgctgtttggctactcggtggtgctgcacagccacgggtcgaagcgctggctcatcgtgggggctcccactgccagctggctctctaatgcctcagtggtcaatcctggggcgatttacagatgcgggatcagaaagaatccaaaccagacctgcgaacagctccagctgggtagccccagtggagagccttgtgggaagacatgcctggaggagagggataaccagtggctgggggtcaccctttccagacagcctggagaaaatggctctatcgtgacttgtgggcacaggtggaaaaatattttttacatgaagagcgataacaaactccccactggcatttgctacgtcatgccttctgatttgcggacagaactgagtaaaaggatggccccgtgttacaaagattatacgagaaaatttggagaaaattttgcatcatgtcaagctggaatatctagtttttacacacaggatttaattgtgatgggggccccgggatcatcgtactggactggcaccgtctttgtctacaatataactacaaaccaatacaaagcatttgtagacagacagaaccaagtaaaatttggaagctacttaggctactcagttggagctggacattttcgaagtccacatactaccgaagtcgtgggaggagcccctcaacacgaacagataggaaaagcatatatatttagcattgatgaaaacgaactgaacatcgtatatgaaatgaaaggtaaaaagcttggctcatactttggagcttctgtctgcgctgtggacctcaatgcagatggcttctcagatctccttgttggagctcccatgcagagcaccatcagggaggaaggaagagtattcgtgtacatcaactctggcatgggagctgtgatggttgaaatggaaagggtccttgtcggaagtgacaaatatgctgcaagatttggggagtctatagcgaatcttggcgacattgacaatgacggctttgaagatattgctattggtgcaccacaagaagacgacttgagaggtgctgtctacatttacaatggccgagtcgatggaatctcctccacctactcacagagaattgaaggacagcaaatcagcaaatcattaaggatgtttggacaatctatctcaggacaaattgatgcagacaacaatggatatgttgatgtagccgttggtgcatttcaatctgattctgcagtgttgctaaggacaaggcctgtagtgattgttgaagcatctttaagccatcctgagtctgtaaataggacaaagtttgactgtactgaaaatggacttccatctgtgtgcatgcatcttacactgtgtttctcatataaaggcaaagaggtcccaggctacatcgttttgttttacaatgtgagcttggatgtgcacaggaaggcagagtctccgtcaagattttatttcttctctaatgggacttctgacgtgattacaggaagcatacgagtttcaagcagtggagagaaatgtaggacacaccaggcattcatgcggaaagacgtgcgagacatccttacccccattcatgtagaggccacataccaccttgggcatcatgtgatcaccaaacgaaacactgaggaatttccaccactccagccgatccttcagcagaagaaagaaaaagacgttattagaaaaatgataaactttgcaaggttttgtgcctatgaaaattgctctgctgatctccaagtttctgcaaaagttggatttttgaagccatatgaaaataaaacctatcttgctgttgggagcatgaagaccataatgctaaacgtgtccttgttcaacgctggcgatgatgcttacgaaaccactctgaatgtccaactccccacaggcctttatttcattaagatcttagacctggaagagaaacaaataaactgcgaagtgactgagagctcaggcatagtgaagcttgcctgcagcctaggttacatatatgtggatcgcctctcaaggatagacattagctttctcctggatgtgagctcactcagcagggcacatgaggacctcagcatcagtgtgcatgcctcctgtgaaaacgagggcgaattggaccaagtgagggacaacagagtgaccttaacgatacctctaaggtatgaggttatgctgactgttcatgggcttgtgaacccaacttcatttgtgtatggatctagcgaagaaaacgagccagaaacatgcatggccgagaagctgaacctcactttccatgttataaacactgggattagcatggctccaaatgttagtgtgaaaataatggtaccaaattcttttctccctcaagatgataagttgttcaacgttttggatgtccagacaactacagggcaatgccattttaaacactatggaagagagtgtacatttgcacagcaaaaaggcatagcggggacgttgaccgatatagtcaaattcctatcaaagactgataagagactcctgtattgcatgaaagctgatcaacactgtttagatttcttatgcaatttcggaaaaatggaaagtgggaaggaagccagcgttcatattcagctggagggcaggccatccatcttggaaatggatgagacctcatcactcaagtttgaaataaaagcaacagcttttccagagccacacccaaaagttattgaactaaataaagatgagaacgtggcccatgttttcttggaagggctccatcatcaaagacccaaacgacatttcaccatcattattattaccatcagcttgctacttggacttattgtacttttattaatttcatgtgttatgtggaaggctggattctttaaaagacagtacaaatctatcctacaagaagaaaacaggagagacagctggagttatgtcaacagcaaaagcaatgatgactgaagacttctacactgagagaactgaaaaactcaggttaggaaaaagaaatcctgttcagaagacccgtcagaatttcttctttttttccatgtgcttatgattttgtgacatactcttagtgcaggggaaatcttcaagaaagaagctacccaaaggtggcttg

SEQ ID NO: 860 - protein, 1049 aa, Mus musculus
PTVASCATLVSGRFVLNVLHQERMAAEARCRPRSRGIALREAVMLLLYFGVPTGHSYNLDPENALLYQGPSGTLFGYSVVLHSHGSKRWLIVGAPTASWLSNASVVNPGAIYRCGIRKNPNQTCEQLQLGSPSGEPCGKTCLEERDNQWLGVTLSRQPGENGSIVTCGHRWKNIFYMKSDNKLPTGICYVMPSDLRTELSKRMAPCYKDYTRKFGENFASCQAGISSFYTQDLIVMGAPGSSYWTGTVFVYNITTNQYKAFVDRQNQVKFGSYLGYSVGAGHFRSPHTTEVVGGAPQHEQIGKAYIFSIDENELNIVYEMKGKKLGSYFGASVCAVDLNADGFSDLLVGAPMQSTIREEGRVFVYINSGMGAVMVEMERVLVGSDKYAARFGESIANLGDIDNDGFEDIAIGAPQEDDLRGAVYIYNGRVDGISSTYSQRIEGQQISKSLRMFGQSISGQIDADNNGYVDVAVGAFQSDSAVLLRWVVIVEASLSHPESVNRTKFDCTENGLPSVCMHLTLCFSYKGKEVPGYIVLFYNVSLDVHRKAESPSRFYFFSNGTSDVITGSIRVSSSGEKCRTHQAFMRKDVRDILTPIHVEATYHLGHHVITKRNTEEFPPLQPILQQKKEKDVIRKMINFARFCAYENCSADLQVSAKVGFLKPYENKTYLAVGSMKTIMLNVSLFNAGDDAYETTLNVQLPTGFIKILDLEEKQINCEVTESSGIVKLACSLGYIYVDRLSRIDISFLLDVSSLSRAHEDLSISVHASCENEGELDQVRDNRVTLTIPLRYEVMLTVHGLVNPTSFVYGSSEENEPETCMAEKLNLTFHVINTGISMAPNVSVKIMVPNSFLPQDDKLFNVLDVQTTTGQCHFKHYGRECTFAQQKGIAGTLTDIVKFLSKTDKRLLYCMKADQHCLDFLCNFGKMESGKEASVHIQLEGRPSIMDETSSLKFEIKATAFPEPHPKVIELNKDENVAHVFLEGLHHQRPKRHFTIIIITISLLLGLIVLLLISCVMWKAGFFKRQYKSILQEENRRDSWSYVNSKSNDD
